(19) United States
(12) Patent Application Publication
(10) Pub. No.: US 2024/0263179 A1
(43) Pub. Date: Aug. 8, 2024

(54) METHODS FOR THE TREATMENT OF NUCLEOTIDE REPEAT EXPANSION DISORDERS ASSOCIATED WITH MSH3 ACTIVITY

(71) Applicant: TAKEDA PHARMACEUTICALS U.S.A., INC., Lexington, MA (US)

(72) Inventors: Nessan Anthony BERMINGHAM, Lexington, MA (US); Brian R. BETTENCOURT, Lexington, MA (US)

(73) Assignee: TAKEDA PHARMACEUTICALS U.S.A., INC., Lexington, MA (US)

(21) Appl. No.: 18/566,561

(22) PCT Filed: Jun. 3, 2022
(86) PCT No.: PCT/US2022/032128

§ 371 Date: Dec. 1, 2023

Related U.S. Application Data
(60) Provisional application No. 63/196,896, filed on Jun. 4, 2021.

(51) Int. Cl. C12N 15/113; C12N 15/10

(52) U.S. Cl. CPC C12N 15/113; C12N 15/1096; C12N 2310/11; C12N 2310/315; C12N 2310/321; C12N 2310/322; C12N 2310/3231; C12N 2310/3341; C12N 2310/346

(57) ABSTRACT

The present disclosure features useful compositions and methods to treat nucleotide repeat expansion disorders, e.g., in a subject in need thereof. In some aspects, the compositions and methods described herein are useful in the treatment of disorders associated with MSH3 activity.

### CROSS REFERENCE TO RELATED APPLICATION

[0001] The present application claims benefit of U.S. Provisional Application No. 63/196,896, filed Jun. 4, 2021, entitled METHODS FOR THE TREATMENT OF NUCLEOTIDE REPEAT EXPANSION DISORDERS ASSOCIATED WITH MSH3 ACTIVITY, the disclosure of which is hereby incorporated by reference in its entirety.

### INCORPORATION BY REFERENCE OF SEQUENCE LISTING

[0002] The contents of the text file named “4398_056PC01_Seglisting_ST25,” which was created on Jun. 2, 2022 and is 1,013,261 bytes in size, is hereby incorporated by reference in its entirety.

### BACKGROUND

[0003] Nucleotide repeat expansion disorders (e.g., trinucleotide repeat expansion disorders) are genetic disorders caused by nucleotide repeat expansions (e.g., trinucleotide repeats). Nucleotide repeat expansions (e.g., trinucleotide repeat expansions) are a type of genetic mutation where nucleotide repeats in certain genes or introns exceed the normal, stable threshold for that gene. The nucleotide repeats (e.g., trinucleotide repeats) can result in defective or toxic gene products, impair RNA transcription, and/or cause toxic effects by forming toxic mRNA transcripts.

[0004] Nucleotide repeat expansion disorders (e.g., trinucleotide repeat expansion disorders) are generally categorized by the type of repeat expansion. For example, Type 1 disorders such as Huntington's disease are caused by CAG repeats which result in a series of glutamine residues known as a polyglutamine tract, Type 2 disorders are caused by heterogeneous expansions that are generally small in magnitude, and Type 3 disorders such as fragile X syndrome are characterized by large repeat expansions that are generally located outside of the protein coding region of the genes. Nucleotide repeat expansion disorders (e.g., trinucleotide repeat expansion disorders) are characterized by a wide variety of symptoms such as progressive degeneration of nerve cells that is common in the Type 1 disorders.

[0005] Subjects with a nucleotide repeat expansion disorder (e.g., a trinucleotide repeat expansion disorder) or those who are considered at risk for developing a nucleotide repeat expansion disorder (e.g., a trinucleotide repeat expansion disorder) have a constitutive nucleotide expansion in a gene associated with disease (i.e., the nucleotide repeat expansion is present in the gene during embryogenesis). Constitutive nucleotide repeat expansions (e.g., trinucleotide repeat expansions) can undergo expansion after embryogenesis (i.e., somatic nucleotide repeat expansion). Both constitutive ucleotide repeat expansion and somatic nucleotide repeat expansion can be associated with presence of disease, age at onset of disease, and/or rate of progression of disease.

### SUMMARY OF THE DISCLOSURE

[0006] The present disclosure features useful compositions and methods to treat nucleotide repeat expansion disorders (e.g., trinucleotide repeat expansion disorders), e.g., in a subject in need thereof. In some aspects, the compositions and methods described herein are useful in the treatment of disorders associated with MSH3 activity.

### Oligonucleotides

[0007] Some aspects of the disclosure are related to single-stranded oligonucleotides of 15-30 linked nucleotides in length, wherein the oligonucleotide, or a portion thereof, is at least 95% complementary to at least 15 contiguous nucleobases at positions 876-901 of SEQ ID NO: 5151, or a pharmaceutically acceptable salt thereof. In some aspects, the oligonucleotide, or a portion thereof, is at least 98% complementary to at least 15 contiguous nucleobases at positions 876-901 of SEQ ID NO: 5151, or a pharmaceutically acceptable salt thereof. In some aspects, the oligonucleotide, or a portion thereof, is at least 99% complementary to at least 15 contiguous nucleobases at positions 876-901 of SEQ ID NO: 5151, or a pharmaceutically acceptable salt thereof. In some aspects, the oligonucleotide, or a portion thereof, is 100% complementary to at least 15 contiguous nucleobases at positions 876-901 of SEQ ID NO: 5151, or a pharmaceutically acceptable salt thereof. In some aspects, the oligonucleotide, or a portion thereof, is complementary to 17-23 contiguous nucleobases at positions 876-901 of SEQ ID NO: 5151, or a pharmaceutically acceptable salt thereof. In some aspects, the oligonucleotide, or a portion thereof, is complementary to 17-20 contiguous nucleobases at positions 876-901 of SEQ ID NO: 5151, or a pharmaceutically acceptable salt thereof. In some aspects, the 17-20 contiguous nucleobases begin at position 876, 877, 878, 879, 880, 881, 882, 883, 884, or 885 of SEQ ID NO: 5151, or a pharmaceutically acceptable salt thereof. In some aspects, the oligonucleotide is 17-20 linked nucleotides in length, or a pharmaceutically acceptable salt thereof. In some aspects, the oligonucleotide, or a portion thereof, is complementary to 20-23 contiguous nucleobases at positions 876-901 of SEQ ID NO: 5151, or a pharmaceutically acceptable salt thereof. In some aspects, the 20-23 contiguous nucleobases begin at position 876, 877, 878, 879, 880, 881, or 882 of SEQ ID NO: 5151, or a pharmaceutically acceptable salt thereof. In some aspects, the oligonucleotide is 20-23 linked nucleotides in length, or a pharmaceutically acceptable salt thereof.

[0008] Some aspects of the disclosure relate to single-stranded oligonucleotides of 15-30 linked nucleotides in length, wherein the oligonucleotide, or a portion thereof, is at least 95% complementary to at least 15 contiguous nucleobases at positions 931-956 of SEQ ID NO: 5151, or a pharmaceutically acceptable salt thereof. In some aspects, the oligonucleotide, or a portion thereof, is at least 98% complementary to at least 15 contiguous nucleobases at positions 931-956 of SEQ ID NO: 5151, or a pharmaceutically acceptable salt thereof. In some aspects, the oligonucleotide, or a portion thereof, is at least 99% complementary to at least 15 contiguous nucleobases at positions 931-956 of SEQ ID NO: 5151, or a pharmaceutically acceptable salt thereof. In some aspects, the oligonucleotide, or a portion thereof, is 100% complementary to at least 15 contiguous nucleobases at positions 931-956 of SEQ ID NO: 5151, or a pharmaceutically acceptable salt thereof. In some aspects, the oligonucleotide, or a portion thereof, is complementary to 17-23 contiguous nucleobases at positions 931-956 of SEQ ID NO: 5151, or a pharmaceutically acceptable salt thereof. In some aspects, the oligonucleotide, or a portion thereof, is complementary to 17-20 contiguous nucleobases at positions 931-956 of SEQ ID NO: 5151, or a pharmaceutically acceptable salt thereof. In some aspects, the oligonucleotide, or a portion thereof, is complementary to 17-20 contiguous nucleobases beginning at position 931, 932, 933, 934, 935, 936, 937, 938, 939, or 940 of SEQ ID NO: 5151, or a pharmaceutically acceptable salt thereof. In some aspects, the oligonucleotide is 17-20 linked nucleotides in length, or a pharmaceutically acceptable salt thereof. In some aspects, the oligonucleotide, or a portion thereof, is complementary to 20-23 contiguous nucleobases at positions 931-956 of SEQ ID NO: 5151, or a pharmaceutically acceptable salt thereof. In some aspects, the oligonucleotide, or a portion thereof, is complementary to 20-23 contiguous nucleobases beginning at position 931, 932, 933, 934, 935, 936, 937 of SEQ ID NO: 5151, or a pharmaceutically acceptable salt thereof. In some aspects, the oligonucleotide is 20-23 linked nucleotides in length, or a pharmaceutically acceptable salt thereof.

[0009] Some aspects of the disclosure are related to single-stranded oligonucleotides of 15-30 linked nucleotides in length, wherein the oligonucleotide, or a portion thereof, is at least 95% complementary to at least 15 contiguous nucleobases at positions 1310-1337 of SEQ ID NO: 5151, or a pharmaceutically acceptable salt thereof. In some aspects, the oligonucleotide, or a portion thereof, is at least 98% complementary to at least 15 contiguous nucleobases at positions 1310-1337 of SEQ ID NO: 5151, or a pharmaceutically acceptable salt thereof. In some aspects, the oligonucleotide, or a portion thereof, is at least 99% complementary to at least 15 contiguous nucleobases at positions 1310-1337 of SEQ ID NO: 5151, or a pharmaceutically acceptable salt thereof. In some aspects, the oligonucleotide, or a portion thereof, is 100% complementary to at least 15 contiguous nucleobases at positions 1310-1337 of SEQ ID NO: 5151, or a pharmaceutically acceptable salt thereof. In some aspects, the oligonucleotide, or a portion thereof, is complementary to 17-23 contiguous nucleobases at positions 1310-1337 of SEQ ID NO: 5151, or a pharmaceutically acceptable salt thereof. In some aspects, the oligonucleotide, or a portion thereof, is complementary to 17-20 contiguous nucleobases at positions 1310-1337 of SEQ ID NO: 5151, or a pharmaceutically acceptable salt thereof. In some aspects, the oligonucleotide, or a portion thereof, is complementary to 17-20 contiguous nucleobases beginning at position 1310, 1311, 1312, 1313, 1314, 1315, 1316, 1317, 1318, 1319, 1320, or 1321 of SEQ ID NO: 5151, or a pharmaceutically acceptable salt thereof. In some aspects, the oligonucleotide is 17-20 linked nucleotides in length, or a pharmaceutically acceptable salt thereof. In some aspects, the oligonucleotide, or a portion thereof, is complementary to 20-23 contiguous nucleobases at positions 1310-1337 of SEQ ID NO: 5151, or a pharmaceutically acceptable salt thereof. In some aspects, the oligonucleotide, or a portion thereof, is complementary to 20-23 contiguous nucleobases beginning at position 1310, 1311, 1312, 1313, 1314, 1315, 1316, 1317, or 1318 of SEQ ID NO: 5151, or a pharmaceutically acceptable salt thereof. In some aspects, the oligonucleotide is 20-23 linked nucleotides in length, or a pharmaceutically acceptable salt thereof.

[0010] Some aspects of the disclosure related to single-stranded oligonucleotides of 15-30 linked nucleotides in length, wherein the oligonucleotide, or a portion thereof, is at least 95% complementary to at least 15 contiguous nucleobases at positions 2141-2169 of SEQ ID NO: 5151, or a pharmaceutically acceptable salt thereof. In some aspects, the oligonucleotide, or a portion thereof, is at least 98% complementary to at least 15 contiguous nucleobases at positions 2141-2169 of SEQ ID NO: 5151, or a pharmaceutically acceptable salt thereof. In some aspects, the oligonucleotide, or a portion thereof, is at least 99% complementary to at least 15 contiguous nucleobases at positions 2141-2169 of SEQ ID NO: 5151, or a pharmaceutically acceptable salt thereof. In some aspects, the oligonucleotide, or a portion thereof, is 100% complementary to at least 15 contiguous nucleobases at positions 2141-2169 of SEQ ID NO: 5151, or a pharmaceutically acceptable salt thereof. In some aspects, the oligonucleotide, or a portion thereof, is complementary to 17-23 contiguous nucleobases at positions 2141-2169 of SEQ ID NO: 5151, or a pharmaceutically acceptable salt thereof. In some aspects, the oligonucleotide, or a portion thereof, is complementary to 17-20 contiguous nucleobases at positions 2141-2169 of SEQ ID NO: 5151, or a pharmaceutically acceptable salt thereof. In some aspects, the oligonucleotide, or a portion thereof, is complementary to 17-20 contiguous nucleobases beginning at position 2141, 2142, 2143, 2144, 2145, 2146, 2147, 2148, 2149, 2150, 2151, 2152, or 2153 of SEQ ID NO: 5151, or a pharmaceutically acceptable salt thereof. In some aspects, the oligonucleotide is 17-20 linked nucleotides in length, or a pharmaceutically acceptable salt thereof. In some aspects, the oligonucleotide, or a portion thereof, is complementary to 20-23 contiguous nucleobases at positions 2141-2169 of SEQ ID NO: 5151, or a pharmaceutically acceptable salt thereof. In some aspects, the oligonucleotide, or a portion thereof, is complementary to 20-23 contiguous nucleobases beginning at position 2141, 2142, 2143, 2144, 2145, 2146, 2147, 2148, 2149, or 2150 of SEQ ID NO: 5151, or a pharmaceutically acceptable salt thereof. In some aspects, the oligonucleotide is 20-23 linked nucleotides in length, or a pharmaceutically acceptable salt thereof.

[0011] Some aspects of the disclosure relate to single-stranded oligonucleotides of 15-30 linked nucleotides in length, wherein the oligonucleotide, or a portion thereof, is at least 95% complementary to at least 15 contiguous nucleobases at positions 2267-2292 of SEQ ID NO: 5151, or a pharmaceutically acceptable salt thereof. In some aspects, the oligonucleotide, or a portion thereof, is at least 98% complementary to at least 15 contiguous nucleobases at positions 2267-2292 of SEQ ID NO: 5151, or a pharmaceutically acceptable salt thereof. In some aspects, the oligonucleotide, or a portion thereof, is at least 99% complementary to at least 15 contiguous nucleobases at positions 2267-2292 of SEQ ID NO: 5151, or a pharmaceutically acceptable salt thereof. In some aspects, the oligonucleotide, or a portion thereof, is 100% complementary to at least 15 contiguous nucleobases at positions 2267-2292 of SEQ ID NO: 5151, or a pharmaceutically acceptable salt thereof. In some aspects, the oligonucleotide, or a portion thereof, is complementary to 17-23 contiguous nucleobases at positions 2267-2292 of SEQ ID NO: 5151, or a pharmaceutically acceptable salt thereof. In some aspects, the oligonucleotide, or a portion thereof, is complementary to 17-20 contiguous nucleobases at positions 2267-2292 of SEQ ID NO: 5151, or a pharmaceutically acceptable salt thereof. In some aspects, the oligonucleotide, or a portion thereof, is complementary to 17-20 contiguous nucleobases beginning at position 2267, 2268, 2269, 2270, 2271, 2272, 2273, 2274, 2275, or 2276 of SEQ ID NO: 5151, or a pharmaceutically acceptable salt thereof. In some aspects, the oligonucleotide is 17-20 linked nucleotides in length, or a pharmaceutically acceptable salt thereof. In some aspects, the oligonucleotide, or a portion thereof, is complementary to 20-23 contiguous nucleobases at positions 2267-2292 of SEQ ID NO: 5151, or a pharmaceutically acceptable salt thereof. In some aspects, the oligonucleotide, or a portion thereof, is complementary to 20-23 contiguous nucleobases beginning at position 2267, 2268, 2269, 2270, 2271, 2272, or 2273 of SEQ ID NO: 5151, or a pharmaceutically acceptable salt thereof. In some aspects, the oligonucleotide is 20-23 linked nucleotides in length, or a pharmaceutically acceptable salt thereof.

[0012] Some aspects of the disclosure relate to single-stranded oligonucleotides of 15-30 linked nucleotides in length, wherein the oligonucleotide is at least 95% complementary to at least 15 contiguous nucleobases at positions 2543-2579 of SEQ ID NO: 5151, or a pharmaceutically acceptable salt thereof. In some aspects, the oligonucleotide, or a portion thereof, is at least 98% complementary to at least 15 contiguous nucleobases at positions 2543-2579 of SEQ ID NO: 5151, or a pharmaceutically acceptable salt thereof. In some aspects, the oligonucleotide, or a portion thereof, is at least 99% complementary to at least 15 contiguous nucleobases at positions 2543-2579 of SEQ ID NO: 5151, or a pharmaceutically acceptable salt thereof. In some aspects, the oligonucleotide, or a portion thereof, is 100% complementary to at least 15 contiguous nucleobases at positions 2543-2579 of SEQ ID NO: 5151, or a pharmaceutically acceptable salt thereof. In some aspects, the oligonucleotide, or a portion thereof, is complementary to 17-23 contiguous nucleobases at positions 2543-2579 of SEQ ID NO: 5151, or a pharmaceutically acceptable salt thereof. In some aspects, the oligonucleotide, or a portion thereof, is complementary to 17-20 contiguous nucleobases at positions 2543-2579 of SEQ ID NO: 5151, or a pharmaceutically acceptable salt thereof. In some aspects, the oligonucleotide, or a portion thereof, is complementary to 17-20 contiguous nucleobases beginning at position 2543, 2544, 2545, 2546, 2547, 2548, 2549, 2550, 2551, 2552, 2553, 2554, 2555, 2556, 2557, 2558, 2559, 2560, 2561, 2562, or 2563 of SEQ ID NO: 5151, or a pharmaceutically acceptable salt thereof. In some aspects, the oligonucleotide is 17-20 linked nucleotides in length, or a pharmaceutically acceptable salt thereof. In some aspects, the oligonucleotide, or a portion thereof, is complementary to 20-23 contiguous nucleobases at positions 2543-2579 of SEQ ID NO: 5151, or a pharmaceutically acceptable salt thereof. In some aspects, the oligonucleotide is complementary to 20-23 contiguous nucleobases beginning at position 2543, 2544, 2545, 2546, 2547, 2548, 2549, 2550, 2551, 2552, 2553, 2554, 2555, 2556, 2557, 2558, 2559, or 2560 of SEQ ID NO: 5151, or a pharmaceutically acceptable salt thereof. In some aspects, the oligonucleotide is 20-23 linked nucleotides in length, or a pharmaceutically acceptable salt thereof.

[0013] Some aspects of the disclosure relate to single-stranded oligonucleotides of 15-30 linked nucleotides in length, wherein the oligonucleotide, or a portion thereof, is at least 95% complementary to at least 15 contiguous nucleobases at positions 2141-2169 of SEQ ID NO: 5151, or a pharmaceutically acceptable salt thereof. In some aspects, the oligonucleotide, or a portion thereof, is at least 98% complementary to at least 15 contiguous nucleobases at positions 2141-2169 of SEQ ID NO: 5151, or a pharmaceutically acceptable salt thereof. In some aspects, the oligonucleotide, or a portion thereof, is at least 99% complementary to at least 15 contiguous nucleobases at positions 2141-2169 of SEQ ID NO: 5151, or a pharmaceutically acceptable salt thereof. In some aspects, the oligonucleotide, or a portion thereof, is 100% complementary to at least 15 contiguous nucleobases at positions 2141-2169 of SEQ ID NO: 5151, or a pharmaceutically acceptable salt thereof. In some aspects, the oligonucleotide, or a portion thereof, is complementary to 17-23 contiguous nucleobases at positions 2141-2169 of SEQ ID NO: 5151, or a pharmaceutically acceptable salt thereof. In some aspects, the oligonucleotide, or a portion thereof, is complementary to 17-20 contiguous nucleobases at positions 2141-2169 of SEQ ID NO: 5151, or a pharmaceutically acceptable salt thereof. In some aspects, the oligonucleotide, or a portion thereof, is complementary to 17-20 contiguous nucleobases beginning at position 2141, 2142, 2143, 2144, 2145, 2146, 2147, 2148, 2149, 2150, 2151, 2152, or 2153 of SEQ ID NO: 5151, or a pharmaceutically acceptable salt thereof. In some aspects, wherein the oligonucleotide is 17-20 linked nucleotides in length, or a pharmaceutically acceptable salt thereof. In some aspects, the oligonucleotide, or a portion thereof, is complementary to 20-23 contiguous nucleobases at positions 2141-2169 of SEQ ID NO: 5151, or a pharmaceutically acceptable salt thereof. In some aspects, the oligonucleotide, or a portion thereof, is complementary to 20-23 contiguous nucleobases beginning at position 2141, 2142, 2143, 2144, 2145, 2146, 2147, 2148, or 2149 of SEQ ID NO: 5151, or a pharmaceutically acceptable salt thereof. In some aspects, the oligonucleotide is 20-23 linked nucleotides in length, or a pharmaceutically acceptable salt thereof.

[0014] Some aspects of the disclosure relate to single-stranded oligonucleotides of 15-30 linked nucleotides in length, wherein the oligonucleotide, or a portion thereof, is at least 95% complementary to at least 15 contiguous nucleobases at positions 2267-2292 of SEQ ID NO: 5151, or a pharmaceutically acceptable salt thereof. In some aspects, the oligonucleotide, or a portion thereof, is at least 98% complementary to at least 15 contiguous nucleobases at positions 2267-2292 of SEQ ID NO: 5151, or a pharmaceutically acceptable salt thereof. In some aspects, the oligonucleotide, or a portion thereof, is at least 99% complementary to at least 15 contiguous nucleobases at positions 2267-2292 of SEQ ID NO: 5151, or a pharmaceutically acceptable salt thereof. In some aspects, the oligonucleotide, or a portion thereof, is 100% complementary to at least 15 contiguous nucleobases at positions 2267-2292 of SEQ ID NO: 5151, or a pharmaceutically acceptable salt thereof. In some aspects, the oligonucleotide, or a portion thereof, is complementary to 17-23 contiguous nucleobases at positions 2267-2292 of SEQ ID NO: 5151, or a pharmaceutically acceptable salt thereof. In some aspects, the oligonucleotide, or a portion thereof, is complementary to 17-20 contiguous nucleobases at positions 2267-2292 of SEQ ID NO: 5151, or a pharmaceutically acceptable salt thereof. In some aspects, the oligonucleotide, or a portion thereof, is complementary to 17-20 contiguous nucleobases beginning at position 2267, 2268, 2269, 2270, 2271, 2272, 2273, 2274, 2275, or 2276 of SEQ ID NO: 5151, or a pharmaceutically acceptable salt thereof. In some aspects, the oligonucleotide is 17-20 linked nucleotides in length, or a pharmaceutically acceptable salt thereof. In some aspects, the oligonucleotide, or a portion thereof, is complementary to 20-23 contiguous nucleobases at positions 2267-2292 of SEQ ID NO: 5151, or a pharmaceutically acceptable salt thereof. In some aspects, the oligonucleotide, or a portion thereof, is complementary to 20-23 contiguous nucleobases beginning at position 2267, 2268, 2269, 2270, 2271, or 2272 of SEQ ID NO: 5151, or a pharmaceutically acceptable salt thereof. In some aspects, the oligonucleotide is 20-23 linked nucleotides in length, or a pharmaceutically acceptable salt thereof.

[0015] Some aspects of the disclosure relate to single-stranded oligonucleotides of 15-30 linked nucleotides in length, wherein the oligonucleotide, or a portion thereof, is at least 95% complementary to at least 15 contiguous nucleobases at positions 2620-2647 of SEQ ID NO: 5151, or a pharmaceutically acceptable salt thereof. In some aspects, the oligonucleotide, or a portion thereof, is at least 98% complementary to at least 15 contiguous nucleobases at positions 2620-2647 of SEQ ID NO: 5151, or a pharmaceutically acceptable salt thereof. In some aspects, the oligonucleotide, or a portion thereof, is at least 99% complementary to at least 15 contiguous nucleobases at positions 2620-2647 of SEQ ID NO: 5151, or a pharmaceutically acceptable salt thereof. In some aspects, the oligonucleotide, or a portion thereof, is 100% complementary to at least 15 contiguous nucleobases at positions 2620-2647 of SEQ ID NO: 5151, or a pharmaceutically acceptable salt thereof. In some aspects, the oligonucleotide, or a portion thereof, is complementary to 17-23 contiguous nucleobases at positions 2620-2647 of SEQ ID NO: 5151, or a pharmaceutically acceptable salt thereof. In some aspects, the oligonucleotide, or a portion thereof, is complementary to 17-20 contiguous nucleobases at positions 2620-2647 of SEQ ID NO: 5151, or a pharmaceutically acceptable salt thereof. In some aspects, the oligonucleotide, or a portion thereof, is complementary to 17-20 contiguous nucleobases beginning at position 2620, 2621, 2622, 2623, 2624, 2625, 2626, 2627, 2628, 2629, 2630, or 2631 of SEQ ID NO: 5151, or a pharmaceutically acceptable salt thereof. In some aspects, the oligonucleotide is 17-20 linked nucleotides in length, or a pharmaceutically acceptable salt thereof. In some aspects, the oligonucleotide, or a portion thereof, is complementary to 20-23 contiguous nucleobases at positions 2620-2647 of SEQ ID NO: 5151, or a pharmaceutically acceptable salt thereof. In some aspects, the oligonucleotide, or a portion thereof, is complementary to 20-23 contiguous nucleobases beginning at position 2620, 2621, 2622, 2623, 2624, 2625, 2626, 2627, or 2627 of SEQ ID NO: 5151, or a pharmaceutically acceptable salt thereof. In some aspects, the oligonucleotide is 20-23 linked nucleotides in length, or a pharmaceutically acceptable salt thereof.

[0016] Some aspects of the disclosure are related to single-stranded oligonucleotides of 15-30 linked nucleotides in length, wherein the oligonucleotide, or a portion thereof, is at least 95% complementary to at least 15 contiguous nucleobases at positions 2685-2710 of SEQ ID NO: 5151, or a pharmaceutically acceptable salt thereof. In some aspects, the oligonucleotide, or a portion thereof, is at least 98% complementary to at least 15 contiguous nucleobases at positions 2685-2710 of SEQ ID NO: 5151, or a pharmaceutically acceptable salt thereof. In some aspects, the oligonucleotide, or a portion thereof, is at least 99% complementary to at least 15 contiguous nucleobases at positions 2685-2710 of SEQ ID NO: 5151, or a pharmaceutically acceptable salt thereof. In some aspects, the oligonucleotide, or a portion thereof, is 100% complementary to at least 15 contiguous nucleobases at positions 2685-2710 of SEQ ID NO: 5151, or a pharmaceutically acceptable salt thereof. In some aspects, the oligonucleotide, or a portion thereof, is complementary to 17-23 contiguous nucleobases at positions 2685-2710 of SEQ ID NO: 5151, or a pharmaceutically acceptable salt thereof. In some aspects, the oligonucleotide, or a portion thereof, is complementary to 17-20 contiguous nucleobases at positions 2685-2710 of SEQ ID NO: 5151, or a pharmaceutically acceptable salt thereof. In some aspects, the oligonucleotide, or a portion thereof, is complementary to 17-20 contiguous nucleobases beginning at position 2685, 2686, 2687, 2688, 2689, 2690, 2691, 2692, 2693, or 2694 of SEQ ID NO: 5151, or a pharmaceutically acceptable salt thereof. In some aspects, the oligonucleotide is 17-20 linked nucleotides in length, or a pharmaceutically acceptable salt thereof. In some aspects, the oligonucleotide is complementary to 20-23 contiguous nucleobases at positions 2685-2710 of SEQ ID NO: 5151, or a pharmaceutically acceptable salt thereof. In some aspects, the oligonucleotide is complementary to 20-23 contiguous nucleobases beginning at position 2685, 2686, 2687, 2688, 2689, 2690, or 2691 of SEQ ID NO: 5151, or a pharmaceutically acceptable salt thereof. In some aspects, the oligonucleotide is 20-23 linked nucleotides in length, or a pharmaceutically acceptable salt thereof.

[0017] Some aspects of the disclosure relate to single-stranded oligonucleotides of 15-30 linked nucleotides in length, wherein the oligonucleotide, or a portion thereof, is at least 95% complementary to at least 15 contiguous nucleobases at positions 2769-2795 of SEQ ID NO: 5151, or a pharmaceutically acceptable salt thereof. In some aspects, the oligonucleotide, or a portion thereof, is at least 98% complementary to at least 15 contiguous nucleobases at positions 2769-2795 of SEQ ID NO: 5151, or a pharmaceutically acceptable salt thereof. In some aspects, the oligonucleotide, or a portion thereof, is at least 99% complementary to at least 15 contiguous nucleobases at positions 2769-2795 of SEQ ID NO: 5151, or a pharmaceutically acceptable salt thereof. In some aspects, the oligonucleotide, or a portion thereof, is 100% complementary to at least 15 contiguous nucleobases at positions 2769-2795 of SEQ ID NO: 5151, or a pharmaceutically acceptable salt thereof. In some aspects, the oligonucleotide, or a portion thereof, is complementary to 17-23 contiguous nucleobases at positions 2769-2795 of SEQ ID NO: 5151, or a pharmaceutically acceptable salt thereof. In some aspects, the oligonucleotide, or a portion thereof, is complementary to 17-20 contiguous nucleobases at positions 2769-2795 of SEQ ID NO: 5151, or a pharmaceutically acceptable salt thereof. In some aspects, the oligonucleotide is complementary to 17-20 contiguous nucleobases beginning at position 2769, 2770, 2771, 2772, 2773, 2774, 2775, 2776, 2777, 2778, or 2779 of SEQ ID NO: 5151, or a pharmaceutically acceptable salt thereof. In some aspects, the oligonucleotide is 17-20 linked nucleotides in length, or a pharmaceutically acceptable salt thereof. In some aspects, the oligonucleotide, or a portion thereof, is complementary to 20-23 contiguous nucleobases at positions 2769-2795 of SEQ ID NO: 5151, or a pharmaceutically acceptable salt thereof. In some aspects, the oligonucleotide, or a portion thereof, is complementary to 20-23 contiguous nucleobases beginning at position 2769, 2770, 2771, 2772, 2773, 2774, 2775, or 2776 of SEQ ID NO: 5151, or a pharmaceutically acceptable salt thereof. In some aspects, the oligonucleotide is 20-23 linked nucleotides in length, or a pharmaceutically acceptable salt thereof.

[0018] Some aspects of the disclosure relate to single-stranded oligonucleotides of 15-30 linked nucleotides in length, wherein the oligonucleotide, or a portion thereof, is at least 95% complementary to at least 15 contiguous nucleobases at positions 2798-2868 of SEQ ID NO: 5151, or a pharmaceutically acceptable salt thereof. In some aspects, the oligonucleotide, or a portion thereof, is at least 98% complementary to at least 15 contiguous nucleobases at positions 2798-2868 of SEQ ID NO: 5151, or a pharmaceutically acceptable salt thereof. In some aspects, the oligonucleotide, or a portion thereof, is at least 99% complementary to at least 15 contiguous nucleobases at positions 2798-2868 of SEQ ID NO: 5151, or a pharmaceutically acceptable salt thereof. In some aspects, the oligonucleotide, or a portion thereof, is 100% complementary to at least 15 contiguous nucleobases at positions 2798-2868 of SEQ ID NO: 5151, or a pharmaceutically acceptable salt thereof. In some aspects, the oligonucleotide, or a portion thereof, is complementary to 17-23 contiguous nucleobases at positions 2798-2868 of SEQ ID NO: 5151, or a pharmaceutically acceptable salt thereof. In some aspects, the oligonucleotide, or a portion thereof, is complementary to 17-20 contiguous nucleobases at positions 2798-2868 of SEQ ID NO: 5151, or a pharmaceutically acceptable salt thereof. In some aspects, the oligonucleotide, or a portion thereof, is complementary to 17-20 contiguous nucleobases beginning at position 2798, 2799, 2800, 2801, 2802, 2803, 2804, 2805, 2806, 2807, 2808, 2809, 2810, 2811, 2812, 2813, 2814, 2815, 2816, 2817, 2818, 2819, 2820, 2821, 2822, 2823, 2824, 2825, 2826, 2827, 2828, 2829, 2830, 2831, 2832, 2833, 2834, 2835, 2836, 2837, 2838, 2839, 2840, 2841, 2842, 2843, 2844, 2845, 2846, 2847, 2848, 2849, 2850, 2851, or 2852 of SEQ ID NO: 5151, or a pharmaceutically acceptable salt thereof. In some aspects, the oligonucleotide is 17-20 linked nucleotides in length, or a pharmaceutically acceptable salt thereof. In some aspects, the oligonucleotide, or a portion thereof, is complementary to 20-23 contiguous nucleobases at positions 2798-2868 of SEQ ID NO: 5151, or a pharmaceutically acceptable salt thereof. In some aspects, the oligonucleotide, or a portion thereof, is complementary to 20-23 contiguous nucleobases beginning at position 2798, 2799, 2800, 2801, 2802, 2803, 2804, 2805, 2806, 2807, 2808, 2809, 2810, 2811, 2812, 2813, 2814, 2815, 2816, 2817, 2818, 2819, 2820, 2821, 2822, 2823, 2824, 2825, 2826, 2827, 2828, 2829, 2830, 2831, 2832, 2833, 2834, 2835, 2836, 2837, 2838, 2839, 2840, 2841, 2842, 2843, 2844, 2845, 2846, 2847, 2848, or 2849 of SEQ ID NO: 5151, or a pharmaceutically acceptable salt thereof. In some aspects, the oligonucleotide is 20-23 linked nucleotides in length, or a pharmaceutically acceptable salt thereof.

[0019] Some aspects of the disclosure relate to single-stranded oligonucleotides of 15-30 linked nucleotides in length, wherein the oligonucleotide, or a portion thereof, is at least 95% complementary to at least 15 contiguous nucleobases at positions 2950-2975 of SEQ ID NO: 5151, or a pharmaceutically acceptable salt thereof. In some aspects, the oligonucleotide, or a portion thereof, is at least 98% complementary to at least 15 contiguous nucleobases at positions 2950-2975 of SEQ ID NO: 5151, or a pharmaceutically acceptable salt thereof. In some aspects, the oligonucleotide, or a portion thereof, is at least 99% complementary to at least 15 contiguous nucleobases at positions 2950-2975 of SEQ ID NO: 5151, or a pharmaceutically acceptable salt thereof. In some aspects, the oligonucleotide, or a portion thereof, is 100% complementary to at least 15 contiguous nucleobases at positions 2950-2975 of SEQ ID NO: 5151, or a pharmaceutically acceptable salt thereof. In some aspects, the oligonucleotide, or a portion thereof, is complementary to 17-23 contiguous nucleobases at positions 2950-2975 of SEQ ID NO: 5151, or a pharmaceutically acceptable salt thereof. In some aspects, the oligonucleotide, or a portion thereof, is complementary to 17-20 contiguous nucleobases at positions 2950-2975 of SEQ ID NO: 5151, or a pharmaceutically acceptable salt thereof. In some aspects, the oligonucleotide, or a portion thereof, is complementary to 17-20 contiguous nucleobases beginning at position 2950, 2951, 2952, 2953, 2954, 2955, 2956, 2957, 2958, or 2959 of SEQ ID NO: 5151, or a pharmaceutically acceptable salt thereof. In some aspects, the oligonucleotide is 17-20 linked nucleotides in length, or a pharmaceutically acceptable salt thereof. In some aspects, the oligonucleotide, or a portion thereof, is complementary to 20-23 contiguous nucleobases at positions 2950-2975 of SEQ ID NO: 5151, or a pharmaceutically acceptable salt thereof. In some aspects, the oligonucleotide, or a portion thereof, is complementary to 20-23 contiguous nucleobases beginning at position 2950, 2951, 2952, 2953, 2954, 2955, or 2956 of SEQ ID NO: 5151, or a pharmaceutically acceptable salt thereof. In some aspects, the oligonucleotide is 20-23 linked nucleotides in length, or a pharmaceutically acceptable salt thereof.

[0020] In some aspects, the oligonucleotide is not any one of Antisense Oligo Nos. 5152-5176 of Table 3.

[0021] In some aspects, the oligonucleotide consists of a nucleobase sequence selected from the group consisting of any of SEQ ID NOs: 1-5150 and 5152-5176, or a pharmaceutically acceptable salt thereof. In some aspects, the oligonucleotide consists of a nucleobase sequence selected from the group consisting of any of SEQ ID NOs: 1-5150, or a pharmaceutically acceptable salt thereof. In some aspects, the oligonucleotide consists of a nucleobase sequence selected from the group consisting of any of SEQ ID NOs: 1-206 and 5152, or a pharmaceutically acceptable salt thereof. In some aspects, the oligonucleotide consists of a nucleobase sequence selected from the group consisting of any of SEQ ID NOs: 1-206, or a pharmaceutically acceptable salt thereof. In some aspects, the oligonucleotide consists of a nucleobase sequence selected from the group consisting of any of SEQ ID NOs: 207-412 and 5153, or a pharmaceutically acceptable salt thereof. In some aspects, the oligonucleotide consists of a nucleobase sequence selected from the group consisting of any of SEQ ID NOs: 207-412, or a pharmaceutically acceptable salt thereof. In some aspects, the oligonucleotide consists of a nucleobase sequence selected from the group consisting of any of SEQ ID NOs: 413-618 and 5154, or a pharmaceutically acceptable salt thereof. In some aspects, the oligonucleotide consists of a nucleobase sequence selected from the group consisting of any of SEQ ID NOs: 413-618, or a pharmaceutically acceptable salt thereof. In some aspects, the oligonucleotide consists of a nucleobase sequence selected from the group consisting of any of SEQ ID NOs: 619-824 and 5155, or a pharmaceutically acceptable salt thereof. In some aspects, the oligonucleotide consists of a nucleobase sequence selected from the group consisting of any of SEQ ID NOs: 619-824, or a pharmaceutically acceptable salt thereof. In some aspects, the oligonucleotide consists of a nucleobase sequence selected from the group consisting of any of SEQ ID NOs: 825-1030 and 5156, or a pharmaceutically acceptable salt thereof. In some aspects, the oligonucleotide consists of a nucleobase sequence selected from the group consisting of any of SEQ ID NOs: 825-1030, or a pharmaceutically acceptable salt thereof. In some aspects, the oligonucleotide consists of a nucleobase sequence selected from the group consisting of any of SEQ ID NOs: 1031-1236 and 5157, or a pharmaceutically acceptable salt thereof. In some aspects, the oligonucleotide consists of a nucleobase sequence selected from the group consisting of any of SEQ ID NOs: 1031-1236, or a pharmaceutically acceptable salt thereof. In some aspects, the oligonucleotide consists of a nucleobase sequence selected from the group consisting of any of SEQ ID NOs: 1237-1442 and 5158, or a pharmaceutically acceptable salt thereof. In some aspects, the oligonucleotide consists of a nucleobase sequence selected from the group consisting of any of SEQ ID NOs: 1237-1442, or a pharmaceutically acceptable salt thereof. In some aspects, the oligonucleotide consists of a nucleobase sequence selected from the group consisting of any of SEQ ID NOs: 1443-1648 and 5159, or a pharmaceutically acceptable salt thereof. In some aspects, the oligonucleotide consists of a nucleobase sequence selected from the group consisting of any of SEQ ID NOs: 1443-1648, or a pharmaceutically acceptable salt thereof. In some aspects, the oligonucleotide consists of a nucleobase sequence selected from the group consisting of any of SEQ ID NOs: 1649-1854 and 5160, or a pharmaceutically acceptable salt thereof. In some aspects, the oligonucleotide consists of a nucleobase sequence selected from the group consisting of any of SEQ ID NOs: 1649-1854, or a pharmaceutically acceptable salt thereof. In some aspects, the oligonucleotide consists of a nucleobase sequence selected from the group consisting of any of SEQ ID NOs: 1855-2060 and 5161, or a pharmaceutically acceptable salt thereof. In some aspects, the oligonucleotide consists of a nucleobase sequence selected from the group consisting of any of SEQ ID NOs: 1855-2060, or a pharmaceutically acceptable salt thereof. In some aspects, the oligonucleotide consists of a nucleobase sequence selected from the group consisting of any of SEQ ID NOs: 2061-2266 and 5162, or a pharmaceutically acceptable salt thereof. In some aspects, the oligonucleotide consists of a nucleobase sequence selected from the group consisting of any of SEQ ID NOs: 2061-2266, or a pharmaceutically acceptable salt thereof. In some aspects, the oligonucleotide consists of a nucleobase sequence selected from the group consisting of any of SEQ ID NOs: 2267-2472 and 5163, or a pharmaceutically acceptable salt thereof. In some aspects, the oligonucleotide consists of a nucleobase sequence selected from the group consisting of any of SEQ ID NOs: 2267-2472, or a pharmaceutically acceptable salt thereof. In some aspects, the oligonucleotide consists of a nucleobase sequence selected from the group consisting of any of SEQ ID NOs: 2473-2678 and 5164, or a pharmaceutically acceptable salt thereof. In some aspects, the oligonucleotide consists of a nucleobase sequence selected from the group consisting of any of SEQ ID NOs: 2473-2678, or a pharmaceutically acceptable salt thereof. In some aspects, the oligonucleotide consists of a nucleobase sequence selected from the group consisting of any of SEQ ID NOs: 2679-2884 and 5165, or a pharmaceutically acceptable salt thereof. In some aspects, the oligonucleotide consists of a nucleobase sequence selected from the group consisting of any of SEQ ID NOs: 2679-2884, or a pharmaceutically acceptable salt thereof. In some aspects, the oligonucleotide consists of a nucleobase sequence selected from the group consisting of any of SEQ ID NOs: 2885-3090 and 5166, or a pharmaceutically acceptable salt thereof. In some aspects, the oligonucleotide consists of a nucleobase sequence selected from the group consisting of any of SEQ ID NOs: 2885-3090, or a pharmaceutically acceptable salt thereof. In some aspects, the oligonucleotide consists of a nucleobase sequence selected from the group consisting of any of SEQ ID NOs: 3091-3296 and 5167, or a pharmaceutically acceptable salt thereof. In some aspects, the oligonucleotide consists of a nucleobase sequence selected from the group consisting of any of SEQ ID NOs: 3091-3296, or a pharmaceutically acceptable salt thereof. In some aspects, the oligonucleotide consists of a nucleobase sequence selected from the group consisting of any of SEQ ID NOs: 3297-3502 and 5168, or a pharmaceutically acceptable salt thereof. In some aspects, the oligonucleotide consists of a nucleobase sequence selected from the group consisting of any of SEQ ID NOs: 3297-3502, or a pharmaceutically acceptable salt thereof. In some aspects, the oligonucleotide consists of a nucleobase sequence selected from the group consisting of any of SEQ ID NOs: 3503-3708 and 5169, or a pharmaceutically acceptable salt thereof. In some aspects, the oligonucleotide consists of a nucleobase sequence selected from the group consisting of any of SEQ ID NOs: 3503-3708, or a pharmaceutically acceptable salt thereof. In some aspects, the oligonucleotide consists of a nucleobase sequence selected from the group consisting of any of SEQ ID NOs: 3709-3914 and 5170, or a pharmaceutically acceptable salt thereof. In some aspects, the oligonucleotide consists of a nucleobase sequence selected from the group consisting of any of SEQ ID NOs: 3709-3914, or a pharmaceutically acceptable salt thereof. In some aspects, the oligonucleotide consists of a nucleobase sequence selected from the group consisting of any of SEQ ID NOs: 3915-4120 and 5171, or a pharmaceutically acceptable salt thereof. In some aspects, the oligonucleotide consists of a nucleobase sequence selected from the group consisting of any of SEQ ID NOs: 3915-4120, or a pharmaceutically acceptable salt thereof. In some aspects, the oligonucleotide consists of a nucleobase sequence selected from the group consisting of any of SEQ ID NOs: 4121-4326 and 5172, or a pharmaceutically acceptable salt thereof. In some aspects, the oligonucleotide consists of a nucleobase sequence selected from the group consisting of any of SEQ ID NOs: 4121-4326, or a pharmaceutically acceptable salt thereof. In some aspects, the oligonucleotide consists of a nucleobase sequence selected from the group consisting of any of SEQ ID NOs: 4327-4532 and 5173, or a pharmaceutically acceptable salt thereof. In some aspects, the oligonucleotide consists of a nucleobase sequence selected from the group consisting of any of SEQ ID NOs: 4327-4532, or a pharmaceutically acceptable salt thereof. In some aspects, the oligonucleotide consists of a nucleobase sequence selected from the group consisting of any of SEQ ID NOs: 4533-4738 and 5174, or a pharmaceutically acceptable salt thereof. In some aspects, the oligonucleotide consists of a nucleobase sequence selected from the group consisting of any of SEQ ID NOs: 4533-4738, or a pharmaceutically acceptable salt thereof. In some aspects, the oligonucleotide consists of a nucleobase sequence selected from the group consisting of any of SEQ ID NOs: 4739-4944 and 5175, or a pharmaceutically acceptable salt thereof. In some aspects, the oligonucleotide consists of a nucleobase sequence selected from the group consisting of any of SEQ ID NOs: 4739-4944, or a pharmaceutically acceptable salt thereof. In some aspects, the oligonucleotide consists of a nucleobase sequence selected from the group consisting of any of SEQ ID NOs: 4945-5150 and 5176, or a pharmaceutically acceptable salt thereof. In some aspects, the oligonucleotide consists of a nucleobase sequence selected from the group consisting of any of SEQ ID NOs: 4945-5150, or a pharmaceutically acceptable salt thereof.

[0022] Some aspects of the disclosure relate to single-stranded oligonucleotides, wherein the nucleobase sequence of the oligonucleotide consists of any one of SEQ ID NOs: 1-5150 and 5152-5176, or a pharmaceutically acceptable salt thereof. In some aspects, the nucleobase sequence of the oligonucleotide consists of any one of SEQ ID NOs: 1-5150, or a pharmaceutically acceptable salt thereof. In some aspects, the nucleobase sequence of the oligonucleotide consists of any one of SEQ ID NOs: 1-206 and 5152, or a pharmaceutically acceptable salt thereof. In some aspects, the nucleobase sequence of the oligonucleotide consists of any one of SEQ ID NOs: 1-206, or a pharmaceutically acceptable salt thereof. In some aspects, the oligonucleotide consists of the nucleobase sequence of any one of SEQ ID NOs: 207-412 and 5153, or a pharmaceutically acceptable salt thereof. In some aspects, the oligonucleotide consists of the nucleobase sequence of any one of SEQ ID NOs: 207-412, or a pharmaceutically acceptable salt thereof. In some aspects, the oligonucleotide consists of the nucleobase sequence of any one of SEQ ID NOs: 413-618 and 5154, or a pharmaceutically acceptable salt thereof. In some aspects, the oligonucleotide consists of the nucleobase sequence of any one of SEQ ID NOs: 413-618, or a pharmaceutically acceptable salt thereof. In some aspects, the oligonucleotide consists of the nucleobase sequence of any one of SEQ ID NOs: 619-824 and 5155, or a pharmaceutically acceptable salt thereof. In some aspects, the oligonucleotide consists of the nucleobase sequence of any one of SEQ ID NOs: 619-824, or a pharmaceutically acceptable salt thereof. In some aspects, the oligonucleotide consists of the nucleobase sequence of any one of SEQ ID NOs: 825-1030 and 5156, or a pharmaceutically acceptable salt thereof. In some aspects, the oligonucleotide consists of the nucleobase sequence of any one of SEQ ID NOs: 825-1030 or a pharmaceutically acceptable salt thereof. In some aspects, the oligonucleotide consists of the nucleobase sequence of any one of SEQ ID NOs: 1031-1236 and 5157, or a pharmaceutically acceptable salt thereof. In some aspects, the oligonucleotide consists of the nucleobase sequence of any one of SEQ ID NOs: 1031-1236, or a pharmaceutically acceptable salt thereof. In some aspects, the oligonucleotide consists of the nucleobase sequence of any one of SEQ ID NOs: 1237-1442 and 5158, or a pharmaceutically acceptable salt thereof. In some aspects, the oligonucleotide consists of the nucleobase sequence of any one of SEQ ID NOs: 1237-1442, or a pharmaceutically acceptable salt thereof. In some aspects, the oligonucleotide consists of the nucleobase sequence of any one of SEQ ID NOs: 1443-1648 and 5159, or a pharmaceutically acceptable salt thereof. In some aspects, the oligonucleotide consists of the nucleobase sequence of any one of SEQ ID NOs: 1443-1648, or a pharmaceutically acceptable salt thereof. In some aspects, the oligonucleotide consists of the nucleobase sequence of any one of SEQ ID NOs: 1649-1854 and 5160 or a pharmaceutically acceptable salt thereof. In some aspects, the oligonucleotide consists of the nucleobase sequence of any one of SEQ ID NOs: 1649-1854, or a pharmaceutically acceptable salt thereof. In some aspects, the oligonucleotide consists of the nucleobase sequence of any one of SEQ ID NOs: 1855-2060 and 5161, or a pharmaceutically acceptable salt thereof. In some aspects, the oligonucleotide consists of the nucleobase sequence of any one of SEQ ID NOs: 1855-2060, or a pharmaceutically acceptable salt thereof. In some aspects, the oligonucleotide consists of the nucleobase sequence of any one of SEQ ID NOs: 2061-2266 and 5162, or a pharmaceutically acceptable salt thereof. In some aspects, the oligonucleotide consists of the nucleobase sequence of any one of SEQ ID NOs: 2061-2266, or a pharmaceutically acceptable salt thereof. In some aspects, the oligonucleotide consists of the nucleobase sequence of any one of SEQ ID NOs: 2267-2472 and 5163, or a pharmaceutically acceptable salt thereof. In some aspects, the oligonucleotide consists of the nucleobase sequence of any one of SEQ ID NOs: 2267-2472, or a pharmaceutically acceptable salt thereof. In some aspects, the oligonucleotide consists of the nucleobase sequence of any one of SEQ ID NOs: 2473-2678 and 5164, or a pharmaceutically acceptable salt thereof. In some aspects, the oligonucleotide consists of the nucleobase sequence of any one of SEQ ID NOs: 2473-2678, or a pharmaceutically acceptable salt thereof. In some aspects, the oligonucleotide consists of the nucleobase sequence of any one of SEQ ID NOs: 2679-2884 and 5165, or a pharmaceutically acceptable salt thereof. In some aspects, the oligonucleotide consists of the nucleobase sequence of any one of SEQ ID NOs: 2679-2884, or a pharmaceutically acceptable salt thereof. In some aspects, the oligonucleotide consists of the nucleobase sequence of any one of SEQ ID NOs: 2885-3090 and 5166, or a pharmaceutically acceptable salt thereof. In some aspects, the oligonucleotide consists of the nucleobase sequence of any one of SEQ ID NOs: 2885-3090, or a pharmaceutically acceptable salt thereof. In some aspects, the oligonucleotide consists of the nucleobase sequence of any one of SEQ ID NOs: 3091-3296 and 5167, or a pharmaceutically acceptable salt thereof. In some aspects, the oligonucleotide consists of the nucleobase sequence of any one of SEQ ID NOs: 3091-3296, or a pharmaceutically acceptable salt thereof. In some aspects, the oligonucleotide consists of the nucleobase sequence of any one of SEQ ID NOs: 3297-3502 and 5168, or a pharmaceutically acceptable salt thereof. In some aspects, the oligonucleotide consists of the nucleobase sequence of any one of SEQ ID NOs: 3297-3502, or a pharmaceutically acceptable salt thereof. In some aspects, the oligonucleotide consists of the nucleobase sequence of any one of SEQ ID NOs: 3503-3708 and 5169, or a pharmaceutically acceptable salt thereof. In some aspects, the oligonucleotide consists of the nucleobase sequence of any one of SEQ ID NOs: 3503-3708, or a pharmaceutically acceptable salt thereof. In some aspects, the oligonucleotide consists of the nucleobase sequence of any one of SEQ ID NOs: 3709-3914 and 5170, or a pharmaceutically acceptable salt thereof. In some aspects, the oligonucleotide consists of the nucleobase sequence of any one of SEQ ID NOs: 3709-3914, or a pharmaceutically acceptable salt thereof. In some aspects, the oligonucleotide consists of the nucleobase sequence of any one of SEQ ID NOs: 3915-4120 and 5171, or a pharmaceutically acceptable salt thereof. In some aspects, the oligonucleotide consists of the nucleobase sequence of any one of SEQ ID NOs: 3915-4120, or a pharmaceutically acceptable salt thereof. In some aspects, the oligonucleotide consists of the nucleobase sequence of any one of SEQ ID NOs: 4121-4326 and 5172, or a pharmaceutically acceptable salt thereof. In some aspects, the oligonucleotide consists of the nucleobase sequence of any one of SEQ ID NOs: 4121-4326, or a pharmaceutically acceptable salt thereof. In some aspects, the oligonucleotide consists of the nucleobase sequence of any one of SEQ ID NOs: 4327-4532 and 5173, or a pharmaceutically acceptable salt thereof. In some aspects, the oligonucleotide consists of the nucleobase sequence of any one of SEQ ID NOs: 4327-4532, or a pharmaceutically acceptable salt thereof. In some aspects, the oligonucleotide consists of the nucleobase sequence of any one of SEQ ID NOs: 4533-4738 and 5174, or a pharmaceutically acceptable salt thereof. In some aspects, the oligonucleotide consists of the nucleobase sequence of any one of SEQ ID NOs: 4533-4738, or a pharmaceutically acceptable salt thereof. In some aspects, the oligonucleotide consists of the nucleobase sequence of any one of SEQ ID NOs: 4739-4944 and 5175, or a pharmaceutically acceptable salt thereof. In some aspects, the oligonucleotide consists of the nucleobase sequence of any one of SEQ ID NOs: 4739-4944, or a pharmaceutically acceptable salt thereof. In some aspects, the oligonucleotide consists of the nucleobase sequence of any one of SEQ ID NOs: 4945-5150 and 5176, or a pharmaceutically acceptable salt thereof. In some aspects, the oligonucleotide consists of the nucleobase sequence of any one of SEQ ID NOs: 4945-5150, or a pharmaceutically acceptable salt thereof. In some aspects, the oligonucleotide consists of the nucleobase sequence selected from the group consisting of any one of SEQ ID NOs: 5152-5176, or a pharmaceutically acceptable salt thereof.

[0023] In some aspects, the oligonucleotide does not have a nucleobase sequence consisting of any one of SEQ ID NOs 5152-5176.

[0024] In some aspects described here, the oligonucleotide described above comprises:
[0025] (a) a DNA core sequence comprising linked deoxyribonucleosides;
[0026] (b) a 5′ flanking sequence comprising linked nucleosides; and
[0027] (c) a 3′ flanking sequence comprising linked nucleosides;
   wherein the DNA core comprises a region of at least 10 contiguous nucleobases positioned between the 5′ flanking sequence and the 3′ flanking sequence; wherein the 5′ flanking sequence and the 3′ flanking sequence each comprises at least two linked nucleosides; and wherein at least one nucleoside of each flanking sequence comprises an alternative nucleoside, or a pharmaceutically acceptable salt thereof.

[0028] In some aspects, the oligonucleotide comprises at least one alternative internucleoside linkage, or a pharmaceutically acceptable salt thereof. In some aspects, the at least one alternative internucleoside linkage is a phosphorothioate internucleoside linkage. In some aspects, the at least one alternative internucleoside linkage is a 2′-alkoxy internucleoside linkage. In some aspects, the at least one alternative internucleoside linkage is an alkyl phosphate internucleoside linkage. In some aspects, the oligonucleotide comprises at least one alternative nucleobase, or a pharmaceutically acceptable salt thereof. In some aspects, the alternative nucleobase is 5′-methylcytosine, pseudouridine, or 5-methoxyuridine. In some aspects, the oligonucleotide comprises at least one alternative sugar moiety, or a pharmaceutically acceptable salt thereof. In some aspects, the alternative sugar moiety is 2′-OMe or a bicyclic nucleic acid. In some aspects, the oligonucleotidefurther comprises a ligand conjugated to the 5′ end or the 3′ end of the oligonucleotide through a monovalent or branched bivalent or trivalent linker, or a pharmaceutically acceptable salt thereof.

[0029] Some aspects of the disclosure relate to oligonucleotides selected from the group consisting of Antisense Oligo Nos. 1-5150 and 5152-5176 of Table 3, or a pharmaceutically acceptable salt thereof. In some aspects, the oligonucleotide is selected from the group consisting of Antisense Oligo Nos. 1-5150 of Table 3, or a pharmaceutically acceptable salt thereof. In some aspects, the oligonucleotide is selected from the group consisting of Antisense Oligo Nos. 1-206 and 5152 of Table 3, or a pharmaceutically acceptable salt thereof. In some aspects, the oligonucleotide is selected from the group consisting of Antisense Oligo Nos. 1-206 of Table 3, or a pharmaceutically acceptable salt thereof. In some aspects, the oligonucleotide is selected from the group consisting of Antisense Oligo Nos. 207-412 and 5153 of Table 3, or a pharmaceutically acceptable salt thereof. In some aspects, the oligonucleotide is selected from the group consisting of Antisense Oligo Nos. 207-412 of Table 3, or a pharmaceutically acceptable salt thereof. In some aspects, the oligonucleotide is selected from the group consisting of Antisense Oligo Nos. 413-618 and 5154 of Table 3, or a pharmaceutically acceptable salt thereof. In some aspects, the oligonucleotide is selected from the group consisting of Antisense Oligo Nos. 413-618 of Table 3, or a pharmaceutically acceptable salt thereof. In some aspects, the oligonucleotide is selected from the group consisting of Antisense Oligo Nos. 619-824 and 5155 of Table 3, or a pharmaceutically acceptable salt thereof. In some aspects, the oligonucleotide is selected from the group consisting of Antisense Oligo Nos. 619-824 of Table 3, or a pharmaceutically acceptable salt thereof. In some aspects, the oligonucleotide is selected from the group consisting of Antisense Oligo Nos. 825-1030 and 5156 of Table 3, or a pharmaceutically acceptable salt thereof. In some aspects, the oligonucleotide is selected from the group consisting of Antisense Oligo Nos. 825-1030 of Table 3, or a pharmaceutically acceptable salt thereof. In some aspects, the oligonucleotide is selected from the group consisting of Antisense Oligo Nos. 1031-1236 and 5157 of Table 3, or a pharmaceutically acceptable salt thereof. In some aspects, the oligonucleotide is selected from the group consisting of Antisense Oligo Nos. 1031-1236 of Table 3, or a pharmaceutically acceptable salt thereof. In some aspects, the oligonucleotide is selected from the group consisting of Antisense Oligo Nos. 1237-1442 and 5158 of Table 3, or a pharmaceutically acceptable salt thereof. In some aspects, the oligonucleotide is selected from the group consisting of Antisense Oligos Nos. 1237-1442 of Table 3, or a pharmaceutically acceptable salt thereof. In some aspects, the oligonucleotide is selected from the group consisting of Antisense Oligos Nos. 1443-1648 and 5159 of Table 3, or a pharmaceutically acceptable salt thereof. In some aspects, the oligonucleotide is selected from the group consisting of Antisense Oligo Nos. 1443-1648 of Table 3, or a pharmaceutically acceptable salt thereof. In some aspects, the oligonucleotide is selected from the group consisting of Antisense Oligo Nos. 1649-1854 and 5160 of Table 3, or a pharmaceutically acceptable salt thereof. In some aspects, the oligonucleotide is selected from the group consisting of Antisense Oligo Nos. 1649-1854 of Table 3, or a pharmaceutically acceptable salt thereof. In some aspects, the oligonucleotide is selected from the group consisting of Antisense Oligo Nos. 1855-2060 and 5161 of Table 3, or a pharmaceutically acceptable salt thereof. In some aspects, the oligonucleotide is selected from the group consisting of Antisense Oligo Nos. 1855-2060 of Table 3 or a pharmaceutically acceptable salt thereof. In some aspects, the oligonucleotide is selected from the group consisting of Antisense Oligo Nos. 2061-2266 and 5162 of Table 3, or a pharmaceutically acceptable salt thereof. In some aspects, the oligonucleotide is selected from the group consisting of Antisense Oligo Nos. 2061-2266 of Table 3, or a pharmaceutically acceptable salt thereof. In some aspects, the oligonucleotide is selected from the group consisting of Antisense Oligo Nos. 2267-2472 and 5163 of Table 3, or a pharmaceutically acceptable salt thereof. In some aspects, the oligonucleotide is selected from the group consisting of Antisense Oligo Nos. 2267-2472 of Table 3, or a pharmaceutically acceptable salt thereof. In some aspects, the oligonucleotide is selected from the group consisting of Antisense Oligo Nos. 2473-2678 and 5164 of Table 3, or a pharmaceutically acceptable salt thereof. In some aspects, the oligonucleotide is Antisense Oligo No. 2473-2678 of Table 3, or a pharmaceutically acceptable salt thereof. In some aspects, the oligonucleotide is selected from the group consisting of Antisense Oligo Nos. 2679-2884 and 5165 of Table 3, or a pharmaceutically acceptable salt thereof. In some aspects, the oligonucleotide is selected from the group consisting of Antisense Oligo Nos. 2679-2884 of Table 3, or a pharmaceutically acceptable salt thereof. In some aspects, the oligonucleotide is selected from the group consisting of Antisense Oligo Nos. 2885-3090 and 5166 of Table 3, or a pharmaceutically acceptable salt thereof. In some aspects, the oligonucleotide is selected from the group consisting of Antisense Oligo Nos. 2885-3090 of Table 3, or a pharmaceutically acceptable salt thereof. In some aspects, the oligonucleotide is selected from the group consisting of Antisense Oligo Nos. 3091-3296 and 5167 of Table 3, or a pharmaceutically acceptable salt thereof. In some aspects, the oligonucleotide is selected from the group consisting of Antisense Oligo Nos. 3091-3296 of Table 3, or a pharmaceutically acceptable salt thereof. In some aspects, the oligonucleotide is selected from the group consisting of Antisense Oligo Nos. 3297-3502 and 5168 of Table 3, or a pharmaceutically acceptable salt thereof. In some aspects, the oligonucleotide is selected from the group consisting of Antisense Oligo Nos. 3297-3502 of Table 3, or a pharmaceutically acceptable salt thereof. In some aspects, the oligonucleotide is selected from the group consisting of Antisense Oligo Nos. 3503-3708 and 5169 of Table 3, or a pharmaceutically acceptable salt thereof. In some aspects, the oligonucleotide is selected from the group consisting of Antisense Oligo Nos. 3503-3708 of Table 3, or a pharmaceutically acceptable salt thereof. In some aspects, the oligonucleotide is selected from the group consisting of Antisense Oligo Nos. 3709-3914 and 5170 of Table 3, or a pharmaceutically acceptable salt thereof. In some aspects, the oligonucleotide is selected from the group consisting of Antisense Oligo Nos. 3709-3914 of Table 3, or a pharmaceutically acceptable salt thereof. In some aspects, the oligonucleotide is selected from the group consisting of Antisense Oligo Nos. 3915-4120 and 5171 of Table 3, or a pharmaceutically acceptable salt thereof. In some aspects, the oligonucleotide is selected from the group consisting of Antisense Oligo Nos. 3915-4120 of Table 3, or a pharmaceutically acceptable salt thereof. In some aspects, the oligonucleotide is selected from the group consisting of Antisense Oligo Nos. 4121-4326 and 5172 of Table 3, or a pharmaceutically acceptable salt thereof. In some aspects, the oligonucleotide is selected from the group consisting of Antisense Oligo Nos. 4121-4326 of Table 3, or a pharmaceutically acceptable salt thereof. In some aspects, the oligonucleotide is selected from the group consisting of Antisense Oligo Nos. 4327-4532 and 5173 of Table 3, or a pharmaceutically acceptable salt thereof. In some aspects, the oligonucleotide is selected from the group consisting of Antisense Oligo Nos. 4327-4532 of Table 3, or a pharmaceutically acceptable salt thereof. In some aspects, the oligonucleotide is selected from the group consisting of Antisense Oligo Nos. 4533-4738 and 5174 of Table 3, or a pharmaceutically acceptable salt thereof. In some aspects, oligonucleotide is selected from the group consisting of Antisense Oligo Nos. 4533-4738 of Table 3, or a pharmaceutically acceptable salt thereof. In some aspects, the oligonucleotide is selected from the group consisting of Antisense Oligo Nos. 4739-4944 and 5175 of Table 3, or a pharmaceutically acceptable salt thereof. In some aspects, the oligonucleotide is selected from the group consisting of Antisense Oligo Nos. 4739-4944 of Table 3, or a pharmaceutically acceptable salt thereof. In some aspects, the oligonucleotide is selected from the group consisting of Antisense Oligo Nos. 4945-5150 and 5176 of Table 3, or a pharmaceutically acceptable salt thereof. In some aspects, the oligonucleotide is selected from the group consisting of Antisense Oligo Nos. 4945-5150 of Table 3, or a pharmaceutically acceptable salt thereof. In some aspects, the oligonucleotide is selected from the group consisting of Antisense Oligo Nos. 5152-5176 of Table 3, or a pharmaceutically acceptable salt thereof.

[0030] In some aspects, the oligonucleotide, or a pharmaceutically acceptable salt thereof, causes at least a 50% reduction in MSH3 mRNA expression at an oligonucleotide concentration of 10 nM. In some aspects, the oligonucleotide, or a pharmaceutically acceptable salt thereof, causes at least a 60% reduction in MSH3 mRNA expression at an oligonucleotide concentration of 10 nM. In some aspects, the oligonucleotide, or a pharmaceutically acceptable salt thereof, causes at least a 70% reduction in MSH3 mRNA expression at an oligonucleotide concentration of 10 nM. In some aspects, the oligonucleotide, or a pharmaceutically acceptable salt thereof, causes at least an 80% reduction in MSH3 mRNA expression at an oligonucleotide concentration of 10 nM.

[0031] In some aspects, the oligonucleotide, or a pharmaceutically acceptable salt thereof, causes at least a 50% reduction in MSH3 mRNA expression at an oligonucleotide concentration of 1 nM. In some aspects, the oligonucleotide, or a pharmaceutically acceptable salt thereof, causes at least a 60% reduction in MSH3 mRNA expression at an oligonucleotide concentration of 1 nM. In some aspects, the oligonucleotide, or a pharmaceutically acceptable salt thereof, causes at least a 70% reduction in MSH3 mRNA expression at an oligonucleotide concentration of 1 nM.

[0032] In some aspects, the MSH3 mRNA expression is evaluated in vitro. In some aspects, the MSH3 mRNA expression is evaluated in a cell based assay. In some aspects, the MSH3 mRNA expression is evaluated in HeLa cells. In some aspects, the MSH3 mRNA expression is determined by the quantitative reverse transcription polymerase chain reaction (RT-qPCR). In some aspects, the MSH3 mRNA is expression is normalized to the mRNA expression of a reference gene. In some aspects, the MSH3 mRNA expression is normalized to the mRNA expression of beta-glucuronidase (GUSB).

[0033] In some aspects, the reduction in MSH3 mRNA expression is relative to a control. In some aspects, the control is the MSH3 mRNA expression in the absence of the oligonucleotide, or pharmaceutically acceptable salt thereof. In some aspects, the control is the MSH3 mRNA expression in the absence of the oligonucleotide, or pharmaceutically acceptable salt thereof, but in the presence of a control oligonucleotide, or salt thereof. In some aspects, the control oligonucleotide, or salt thereof, is a scrambled luciferase targeting oligonucleotide. In some aspects, the reduction in MSH3 mRNA expression is calculated by a delta-delta Ct (ΔΔCT) method. In some aspects, the delta-delta Ct (ΔΔCT) method comprises the normalization of the MSH3 mRNA expression to the mRNA expression of a reference gene and to the MSH3 mRNA expression in the absence of the oligonucleotide, or pharmaceutically acceptable salt thereof but in the presence of a control oligonucleotide, or salt thereof. In some aspects, the reference gene is beta-glucuronidase (GUSB) and/or the control oligonucleotide, or salt thereof, is a scrambled luciferase targeting oligonucleotide. In some aspects, the reduction in MSH3 mRNA expression is determined by the method of Example 1.

[0034] In some aspects, the oligonucleotide is in the free base form. In some aspects, the oligonucleotide is a pharmaceutically acceptable salt thereof. In some aspects, the oligonucleotide is a sodium salt.

### Pharmaceutical Compositions and Methods of Treatment Using the Same

[0035] In some aspects, the application is directed to a pharmaceutical composition comprising one or more of the oligonucleotides, or pharmaceutically acceptable salts thereof, described herein and a pharmaceutically acceptable carrier or excipient.

[0036] In some aspects, the application is directed to a composition comprising one or more of the oligonucleotides or pharmaceutically acceptable salts thereof, described herein and a lipid nanoparticle, a polyplex nanoparticle, a lipoplex nanoparticle, or a liposome.

[0037] In some aspects, the application is directed to a method of inhibiting transcription of MSH3 in a cell, the method comprising contacting the cell with one or more of the oligonucleotides or pharmaceutically acceptable salts thereof, described herein, a pharmaceutical composition of one or more of the oligonucleotides or pharmaceutically acceptable salts thereof, described herein, or the composition of one or more oligonucleotides or pharmaceutically acceptable salts thereof, described herein and a lipid nanoparticle, a polyplex nanoparticle, a lipoplex nanoparticle, or a liposome; for a time sufficient to obtain degradation of an mRNA transcript of a MSH3 gene, inhibiting expression of the MSH3 gene in the cell.

[0038] In some aspects, the application is directed to a method of treating, preventing, or delaying the progression a nucleotide repeat expansion disorder (e.g., a trinucleotide repeat expansion disorder) in a subject in need thereof, the method comprising contacting the cell with one or more of the oligonucleotides or pharmaceutically acceptable salts thereof, described herein, a pharmaceutical composition of one or more of the oligonucleotides or pharmaceutically acceptable salts thereof, described herein, or the composition of one or more oligonucleotides or pharmaceutically acceptable salts thereof, described herein and a lipid nanoparticle, a polyplex nanoparticle, a lipoplex nanoparticle, or a liposome; for a time sufficient to obtain degradation of an mRNA transcript of a MSH3 gene, inhibiting expression of the MSH3 gene in the cell.

[0039] In some aspects, the application is directed to a method of reducing the level and/or activity of MSH3 in a cell of a subject identified as having a nucleotide repeat expansion disorder (e.g., a trinucleotide repeat expansion disorder), the method comprising contacting the cell with one or more of the oligonucleotides or pharmaceutically acceptable salts thereof, described herein, a pharmaceutical composition of one or more of the oligonucleotides or pharmaceutically acceptable salts thereof, described herein, or the composition of one or more oligonucleotides, or pharmaceutically acceptable salts thereof, described herein and a lipid nanoparticle, a polyplex nanoparticle, a lipoplex nanoparticle, or a liposome, for a time sufficient to obtain degradation of an mRNA transcript of a MSH3 gene, inhibiting expression of the MSH3 gene in the cell.

[0040] In some aspects, the application is directed to a method for inhibiting expression of an MSH3 gene in a cell comprising contacting the cell with one or more of the oligonucleotides, or pharmaceutically acceptable salts thereof, described herein, a pharmaceutical composition of one or more of the oligonucleotides, or pharmaceutically acceptable salts thereof, described herein, or the composition of one or more oligonucleotides, or pharmaceutically acceptable salts thereof, described herein and a lipid nanoparticle, a polyplex nanoparticle, a lipoplex nanoparticle, or a liposome; for a time sufficient to obtain degradation of an mRNA transcript of a MSH3 gene, inhibiting expression of the MSH3 gene in the cell, and maintaining the cell for a time sufficient to obtain degradation of a mRNA transcript of an MSH3 gene, thereby inhibiting expression of the MSH3 gene in the cell.

[0041] In some aspects, the application is directed to a method of decreasing nucleotide repeat expansion (e.g., trinucleotide repeat expansion) in a cell, the method comprising contacting the cell with one or more of the oligonucleotides, or pharmaceutically acceptable salts thereof, described herein, a pharmaceutical composition of one or more of the oligonucleotides, or pharmaceutically acceptable salts thereof, described herein, or the composition of one or more oligonucleotides, or pharmaceutically acceptable salts thereof, described herein and a lipid nanoparticle, a polyplex nanoparticle, a lipoplex nanoparticle, or a liposome; for a time sufficient to obtain degradation of an mRNA transcript of a MSH3 gene, inhibiting expression of the MSH3 gene in the cell.

[0042] In some aspects, the cell is in a subject. In some aspects, the subject is a human. In some aspects, the cell is a cell of the central nervous system or a muscle cell.

[0043] In some aspects, the subject is identified as having a nucleotide repeat expansion disorder (e.g., a trinucleotide repeat expansion disorder). In some aspects, the nucleotide repeat expansion diorder is spinocerebellar ataxia type 36 or frontotemporal dementia. In some aspects, the nucleotide repeat expansion disorder is a trinucleotide repeat expansion disorder. In some aspects, the trinucleotide repeat expansion disorder is a polyglutamine disease. In some aspects, the polyglutamine disease is selected from the group consisting of dentatorubropallidoluysian atrophy, Huntington's disease, spinal and bulbar muscular atrophy, spinocerebellar ataxia type 1, spinocerebellar ataxia type 2, spinocerebellar ataxia type 3, spinocerebellar ataxia type 6, spinocerebellar ataxia type 7, spinocerebellar ataxia type 17, and Huntington's disease-like 2. In some aspects, the nucleotide repeat expansion disorder (e.g., a trinucleotide repeat expansion disorder) is Huntington's disease.

[0044] In some aspects, the nucleotide repeat expansion disorder (e.g., a trinucleotide repeat expansion disorder) is a non-polyglutamine disease. In some aspects, the non-polyglutamine disease is selected from the group consisting of fragile X syndrome, fragile X-associated tremor/ataxia syndrome, fragile XE mental retardation, Friedreich's ataxia, myotonic dystrophy type 1, spinocerebellar ataxia type 8, spinocerebellar ataxia type 12, oculopharyngeal muscular dystrophy, Fragile X-associated premature ovarian failure, FRA2A syndrome, FRA7A syndrome, and early infantile epileptic encephalopathy. In some aspects, the nucleotide repeat expansion disorder (e.g., trinucleotide repeat expansion disorder) is Friedreich's ataxia. In some aspects, the nucleotide repeat expansion disorder (e.g., trinucleotide repeat expansion disorder) is myotonic dystrophy type 1.

[0045] In some aspects, the application is directed one or more of the oligonucleotides, or pharmaceutically acceptable salts thereof, described herein, a pharmaceutical composition of one or more of the oligonucleotides, or pharmaceutically acceptable salts thereof, described herein, or the composition of one or more oligonucleotides, or pharmaceutically acceptable salts thereof, described herein and a lipid nanoparticle, a polyplex nanoparticle, a lipoplex nanoparticle, or a liposome, for use in the prevention or treatment of a nucleotide repeat expansion disorder (e.g., a trinucleotide repeat expansion disorder). In some aspects, the one or more of the oligonucleotides, or pharmaceutically acceptable salts thereof, described herein, the pharmaceutical composition of one or more of the oligonucleotides, or pharmaceutically acceptable salts thereof, described herein, or the composition of one or more oligonucleotides, or pharmaceutically acceptable salts thereof, described herein and a lipid nanoparticle, a polyplex nanoparticle, a lipoplex nanoparticle, or a liposome is administered intrathecally.

[0046] In some aspects, the one or more of the oligonucleotides, or pharmaceutically acceptable salts thereof, described herein, the pharmaceutical composition of one or more of the oligonucleotides, or pharmaceutically acceptable salts thereof, described herein, or the composition of one or more oligonucleotides, or pharmaceutically acceptable salts thereof, described herein and a lipid nanoparticle, a polyplex nanoparticle, a lipoplex nanoparticle, or a liposome is administered intraventricularly.

[0047] In some aspects, the one or more of the oligonucleotides, or pharmaceutically acceptable salts thereof, described herein, the pharmaceutical composition of one or more of the oligonucleotides, or pharmaceutically acceptable salts thereof, described herein, or the composition of one or more oligonucleotides, or pharmaceutically acceptable salts thereof, described herein and a lipid nanoparticle, a polyplex nanoparticle, a lipoplex nanoparticle, or a liposome is administered intramuscularly.

[0048] In some aspects, the application is directed to a method of treating, preventing, or delaying progression a disorder in a subject in need thereof wherein the subject is suffering from a nucleotide repeat expansion disorder (e.g., a trinucleotide repeat expansion disorder), comprising administering to said subject one or more of the oligonucleotides, or pharmaceutically acceptable salts thereof, described herein, the pharmaceutical composition of one or more of the oligonucleotides, or pharmaceutically acceptable salts thereof, described herein, or the composition of one or more oligonucleotides, or pharmaceutically acceptable salts thereof, described herein and a lipid nanoparticle, a polyplex nanoparticle, a lipoplex nanoparticle, or a liposome.

[0049] In some aspects, the method of treating, preventing, or delaying progression of a disorder in a subject further comprises administering an additional therapeutic agent. In some aspects, the additional therapeutic agent is another oligonucleotide, or pharmaceutically acceptable salt thereof, that hybridizes to an mRNA encoding the Huntingtin gene.

[0050] In some aspects, the method of treating, preventing, or delaying progression of a disorder in a subject progression delays progression of the nucleotide repeat expansion disorder (e.g., a trinucleotide repeat expansion disorder) by at least 120 days, for example, at least 6 months, at least 12 months, at least 2 years, at least 3 years, at least 4 years, at least 5 years, at least 10 years or more, when compared with a predicted progression.

[0051] In some aspects, the application is directed to one or more of the oligonucleotides, or pharmaceutically acceptable salts thereof, described herein, the pharmaceutical composition of one or more of the oligonucleotides, or pharmaceutically acceptable salts thereof, described herein, or the composition of one or more oligonucleotides, or pharmaceutically acceptable salts thereof, described herein and a lipid nanoparticle, a polyplex nanoparticle, a lipoplex nanoparticle, or a liposome for use in preventing or delaying progression of a nucleotide repeat expansion disorder (e.g., a trinucleotide repeat expansion disorder) in a subject

### Definitions

[0052] For convenience, the meaning of some terms and phrases used in the specification, examples, and appended claims are provided below. Unless stated otherwise, or implicit from context, the following terms and phrases include the meanings provided below. The definitions are provided to aid in describing particular aspects, and are not intended to limit the claimed technology, because the scope of the technology is limited only by the claims. Unless otherwise defined, all technical and scientific terms used herein have the same meaning as commonly understood by one of ordinary skill in the art to which this technology belongs. If there is an apparent discrepancy between the usage of a term in the art and its definition provided herein, the definition provided within the specification shall prevail.

[0053] In this application, unless otherwise clear from context, (i) the term “a” can be understood to mean “at least one”; (ii) the term “or” can be understood to mean “and/or”; and (iii) the terms “including” and “comprising” can be understood to encompass itemized components or steps whether presented by themselves or together with one or more additional components or steps.

[0054] As used herein, the terms “about” and “approximately” refer to a value that is within 10% above or below the value being described. For example, the term “about 5 nM” indicates a range of from 4.5 to 5.5 nM.

[0055] The term “at least” prior to a number or series of numbers is understood to include the number adjacent to the term “at least”, and all subsequent numbers or integers that could logically be included, as clear from context. For example, the number of nucleotides in a nucleic acid molecule must be an integer. For example, “at least 18 nucleotides of a 21-nucleotide nucleic acid molecule” means that 18, 19, 20, or 21 nucleotides have the indicated property. When at least is present before a series of numbers or a range, it is understood that “at least” can modify each of the numbers in the series or range. “At least” is also not limited to integers (e.g., “at least 5% includes 5.0%, 5.1%, and 5.18% without consideration of the number of significant figures.

[0056] As used herein, “no more than” or “less than” is understood as the value adjacent to the phrase and logical lower values or integers, as logical from context, to zero. For example, an oligonucleotide with “no more than 3 mismatches to a target sequence” has 3, 2, 1, or 0 mismatches to a target sequence. When “no more than” is present before a series of numbers or a range, it is understood that “no more than” can modify each of the numbers in the series or range.

[0057] As used herein, the term “administration” refers to the administration of a composition (e.g., a compound or a preparation that includes a compound as described herein) to a subject or system. Administration to an animal subject (e.g., to a human) can be by any appropriate route, such as one described herein.

[0058] As used herein, a “combination therapy” or “administered in combination” means that two (or more) different agents or treatments are administered to a subject as part of a defined treatment regimen for a particular disease or condition. The treatment regimen defines the doses and periodicity of administration of each agent such that the effects of the separate agents on the subject overlap. In some aspects, the delivery of the two or more agents is simultaneous or concurrent and the agents can be co-formulated. In some aspects, the two or more agents are not co-formulated and are administered in a sequential manner as part of a prescribed regimen. In some aspects, administration of two or more agents or treatments in combination is such that the reduction in a symptom, or other parameter related to the disorder is greater than what would be observed with one agent or treatment delivered alone or in the absence of the other. The effect of the two treatments can be partially additive, wholly additive, or greater than additive (e.g., synergistic). Sequential or substantially simultaneous administration of each therapeutic agent can be effected by any appropriate route including, but not limited to, oral routes, intraocular routes, subcutaneous routes, intra cisterna magna routes, intravenous routes, intramuscular routes, and direct absorption through mucous membrane tissues. The therapeutic agents can be administered by the same route or by different routes. For example, one therapeutic agent of the combination can be administered by intravenous injection while an additional therapeutic agent of the combination can be administered orally.

[0059] As used herein, the term “MSH3” refers to MutS Homolog 3, a DNA mismatch repair protein, having an amino acid sequence from any vertebrate or mammalian source, including, but not limited to, human, bovine, chicken, rodent, mouse, rat, porcine, ovine, primate, monkey, and guinea pig, unless specified otherwise. The term also refers to fragments and variants of native MSH3 that maintain at least one in vivo or in vitro activity of a native MSH3. The term encompasses full-length unprocessed precursor forms of MSH3 as well as mature forms resulting from post-translational cleavage of the signal peptide. MSH3 is encoded by the MSH3 gene. The nucleic acid sequence of an exemplary Homo sapiens (human) MSH3 gene is set forth in NCBI Reference NM_002439.4 or in SEQ ID NO: 385. The term “MSH3” also refers to natural variants of the wild-type MSH3 protein, such as proteins having at least 85% identity (e.g., 85%, 86%, 87%, 88%, 89%, 90%, 91%, 92%, 93%, 94%, 95%, 96%, 97%, 98%, 99%, 99.9% identity, or more) to the amino acid sequence of wild-type human MSH3, which is set forth in NCBI Reference No. NP_002430.3 or in SEQ ID NO: 386. The nucleic acid sequence of an exemplary Mus musculus (mouse) MSH3 gene is set forth in NCBI Reference No. NM_010829.2 or in SEQ ID NO: 387. The nucleic acid sequence of an exemplary Rattus norvegicus (rat) MSH3 gene is set forth in NCBI Reference No. NM_001191957.1 or in SEQ ID NO: 388. The nucleic acid sequence of an exemplary Macaca fascicularis (cyno) MSH3 gene is set forth in NCBI Reference No. XM_005557283.2 or in SEQ ID NO: 389.

[0060] The term “MSH3” as used herein also refers to a particular polypeptide expressed in a cell by naturally occurring DNA sequence variations of the MSH3 gene, such as a single nucleotide polymorphism in the MSH3 gene. Numerous SNPs within the MSH3 gene have been identified and can be found at, for example, NCBI dbSNP (see, e.g., www.ncbi.nlm.nih.gov/snp). Non-limiting examples of SNPs within the MSH3 gene can be found at, NCBI dbSNP Accession Nos.: rs1650697, rs70991108, rs10168, rs26279, rs26282, rs26779, rs26784, rs32989, rs33003, rs33008, rs33013, rs40139, rs181747, rs184967, rs245346, rs245397, rs249633, rs380691, rs408626, rs442767, rs836802, rs836808, rs863221, rs1105525, rs1428030, rs1478834, rs1650694, rs1650737, rs1677626, rs1677658, rs1805355, rs2897298, rs3045983, rs3797897, rs4703819, rs6151627, rs6151640, rs6151662, rs6151670, rs6151735, rs6151838, rs7709909, rs7712332, rs10079641, rs12513549, and rs12522132.

[0061] As used herein, “target sequence” refers to a contiguous portion of the nucleotide sequence of an mRNA molecule formed during the transcription of an MSH3 gene, including mRNA that is a product of RNA processing of a primary transcription product. In one aspect, the target portion of the sequence will be at least long enough to serve as a substrate for oligonucleotide-directed (e.g., antisense oligonucleotide (ASO)-directed) cleavage at or near that portion of the nucleotide sequence of an mRNA molecule formed during the transcription of a MSH3 gene. The target sequence can be, for example, from about 9-36 nucleotides in length, e.g., about 15-30 nucleotides in length. For example, the target sequence can be 15, 16, 17, 18, 19, 20, 21, 22, 23, 24, 25, 26, 27, 28, 29, or 30 or from about 15-30 nucleotides, 15-29, 15-28, 15-27, 15-26, 15-25, 15-24, 15-23, 15-22, 15-21, 15-20, 15-19, 15-18, 15-17, 18-30, 18-29, 18-28, 18-27, 18-26, 18-25, 18-24, 18-23, 18-22, 18-21, 18-20, 19-30, 19-29, 19-28, 19-27, 19-26, 19-25, 19-24, 19-23, 19-22, 19-21, 19-20, 20-30, 20-29, 20-28, 20-27, 20-26, 20-25, 20-24, 20-23, 20-22, 20-21, 21-30, 21-29, 21-28, 21-27, 21-26, 21-25, 21-24, 21-23, or 21-22 nucleotides in length. Ranges and lengths intermediate to the above recited ranges and lengths are also contemplated.

[0062] “G,” “C,” “A,” “T,” and “U” each generally stand for a naturally-occurring nucleotide that contains guanine, cytosine, adenine, thymidine, and uracil as a base, respectively. However, it will be understood that the term “nucleotide” can refer to an alternative nucleotide, as further detailed below, or a surrogate replacement moiety. The skilled person is well aware that guanine, cytosine, adenine, and uracil can be replaced by other moieties without substantially altering the base pairing properties of an oligonucleotide comprising a nucleotide bearing such replacement moiety. For example, without limitation, a nucleotide comprising inosine as its base can base pair with nucleotides containing adenine, cytosine, or uracil. Hence, nucleotides containing uracil, guanine, or adenine can be replaced in the nucleotide sequences of oligonucleotides by a nucleotide containing, for example, inosine. In another example, adenine and cytosine anywhere in the oligonucleotide can be replaced with guanine and uracil, respectively to form G-U Wobble base pairing with the target mRNA. Sequences containing such replacement moieties are suitable for the compositions and methods featured herein.

[0063] The terms “nucleobase” and “base” include the purine (e.g. adenine and guanine) and pyrimidine (e.g. uracil, thymine, and cytosine) moiety present in nucleosides and nucleotides which form hydrogen bonds in nucleic acid hybridization. The term nucleobase also encompasses alternative nucleobases which can differ from naturally-occurring nucleobases, but are functional during nucleic acid hybridization. In this context, “nucleobase” refers to both naturally occurring nucleobases such as adenine, guanine, cytosine, thymidine, uracil, xanthine, and hypoxanthine, as well as alternative nucleobases. Such variants are for example described in Hirao et al (2012) Accounts of Chemical Research vol 45 page 2055 and Bergstrom (2009) Current Protocols in Nucleic Acid Chemistry Suppl. 37 1.4.1.

[0064] The term “nucleoside” refers to a monomeric unit of an oligonucleotide or a polynucleotide having a nucleobase and a sugar moiety. A nucleoside can include those that are naturally-occurring as well as alternative nucleosides, such as those described herein. The nucleobase of a nucleoside can be a naturally-occurring nucleobase or an alternative nucleobase. Similarly, the sugar moiety of a nucleoside can be a naturally-occurring sugar or an alternative sugar.

[0065] The term “alternative nucleoside” refers to a nucleoside having an alternative sugar or an alternative nucleobase, such as those described herein.

[0066] In some aspects the nucleobase moiety is modified by changing the purine or pyrimidine into a modified purine or pyrimidine, such as substituted purine or substituted pyrimidine, such as an “alternative nucleobase” selected from isocytosine, pseudoisocytosine, 5-methyl cytosine, 5-thiozolo-cytosine, 5-propynyl-cytosine, 5-propynyl-uridine, 5-bromouridine 5-thiazolo-uridine, 2-thio-uridine, pseudouridine, 1-methylpseudouridine, 5-methoxyuridine, 2′-thio-thymine, inosine, diaminopurine, 6-aminopurine, 2-aminopurine, 2,6-diaminopurine, and 2-chloro-6-aminopurine.

[0067] The nucleobase moieties can be indicated by the letter code for each corresponding nucleobase, e.g. A, T, G, C, or U, wherein each letter can include alternative nucleobases of equivalent function. In some aspects, e.g., for gapmers, 5-methyl cytosine LNA nucleosides can be used.

[0068] A “sugar” or “sugar moiety,” includes naturally occurring sugars having a furanose ring. A sugar also includes an “alternative sugar,” defined as a structure that is capable of replacing the furanose ring of a nucleoside. In some aspects, alternative sugars are non-furanose (or 4′-substituted furanose) rings or ring systems or open systems. Such structures include simple changes relative to the natural furanose ring, such as a six-membered ring, or can be more complicated as is the case with the non-ring system used in peptide nucleic acid. Alternative sugars can include sugar surrogates wherein the furanose ring has been replaced with another ring system such as, for example, a morpholino or hexitol ring system. Sugar moieties useful in the preparation of oligonucleotides having motifs include, without limitation, β-D-ribose, β-D-2′-deoxyribose, substituted sugars (such as 2′, 5′ and bis substituted sugars), 4′-S-sugars (such as 4′-S-ribose, 4′-S-2′-deoxyribose and 4′-S-2′-substituted ribose), bicyclic alternative sugars (such as the 2′-OCH₂-4′ or 2′-O(CH₂)₂-4′ bridged ribose derived bicyclic sugars) and sugar surrogates (such as when the ribose ring has been replaced with a morpholino or a hexitol ring system). The type of heterocyclic base and internucleoside linkage used at each position is variable and is not a factor in determining the motif. In most nucleosides having an alternative sugar moiety, the heterocyclic nucleobase is generally maintained to permit hybridization.

[0069] A “nucleotide,” as used herein, refers to a monomeric unit of an oligonucleotide or polynucleotide that comprises a nucleoside and an internucleosidic linkage. The internucleosidic linkage can include a phosphate linkage. Similarly, “linked nucleosides” can be linked by phosphate linkages. Many “alternative internucleosidic linkages” are known in the art, including, but not limited to, phosphate, phosphorothioate, and boronophosphate linkages. Alternative nucleosides include bicyclic nucleosides (BNAs) (e.g., locked nucleosides (LNAs (e.g., A-LNA, 5mC L-NA, G-LNA, T-LNA) and constrained ethyl (cEt) nucleosides), peptide nucleosides (PNAs), phosphotriesters, phosphorothionates, phosphoramidates, and other variants of the phosphate backbone of native nucleoside, including those described herein.

[0070] An “alternative nucleotide,” as used herein, refers to a nucleotide having an alternative nucleoside or an alternative sugar, and an internucleoside linkage, which can include alternative nucleoside linkages.

[0071] The terms “oligonucleotide” and “polynucleotide,” as used herein, are defined as it is generally understood by the skilled person as a molecule comprising two or more covalently linked nucleosides. Such covalently bound nucleosides can be referred to as nucleic acid molecules or oligomers. Oligonucleotides are commonly made in the laboratory by solid-phase chemical synthesis followed by purification. When referring to a sequence of the oligonucleotide, reference is made to the sequence or order of nucleobase moieties, or modifications thereof, of the covalently linked nucleotides or nucleosides. The oligonucleotide can be man-made. For example, the oligonucleotide can be chemically synthesized, and be purified or isolated. Oligonucleotide is also intended to include (i) compounds that have one or more furanose moieties that are replaced by furanose derivatives or by any structure, cyclic or acyclic, that can be used as a point of covalent attachment for the base moiety, (ii) compounds that have one or more phosphodiester linkages that are either modified, as in the case of phosphoramidate or phosphorothioate linkages, or completely replaced by a suitable linking moiety as in the case of formacetal or riboacetal linkages, and/or (iii) compounds that have one or more linked furanose-phosphodiester linkage moieties replaced by any structure, cyclic or acyclic, that can be used as a point of covalent attachment for the base moiety. The oligonucleotide can comprise one or more alternative nucleosides or nucleotides (e.g., including those described herein). It is also understood that oligonucleotide includes compositions lacking a sugar moiety or nucleobase but are still capable of forming a pairing with or hybridizing to a target sequence. “Oligonucleotide” refers to a short polynucleotide (e.g., of 100 or fewer linked nucleosides).

[0072] As used herein, the term “oligonucleotide comprising a nucleobase sequence” refers to an oligonucleotide comprising a chain of nucleotides or nucleosides that is described by the sequence referred to using the standard nucleotide nomenclature.

[0073] The term “contiguous nucleobase region” refers to the region of the oligonucleotide which is complementary to the target nucleic acid. The term can be used interchangeably herein with the term “contiguous nucleotide sequence” or “contiguous nucleobase sequence.” In some aspects, all the nucleotides of the oligonucleotide are present in the contiguous nucleotide or nucleoside region. In some aspects, the oligonucleotide comprises the contiguous nucleotide region and can comprise further nucleotide(s) or nucleoside(s), for example a nucleotide linker region which can be used to attach a functional group to the contiguous nucleotide sequence. The nucleotide linker region can be complementary to the target nucleic acid. In some aspects, the internucleoside linkages present between the nucleotides of the contiguous nucleotide region are all phosphorothioate internucleoside linkages. In some aspects, the contiguous nucleotide region comprises one or more sugar-modified nucleosides.

[0074] The term “gapmer,” as used herein, refers to an oligonucleotide which comprises a region of RNase H recruiting oligonucleotides (gap or DNA core) which is flanked 5′ and 3′ by regions which comprise one or more affinity enhancing alternative nucleosides (wings or flanking sequence). Various gapmer designs are described herein. Headmers and tailmers are oligonucleotides capable of recruiting RNase H where one of the flanks is missing, i.e. only one of the ends of the oligonucleotide comprises affinity enhancing alternative nucleosides. For headmers the 3′ flanking sequence is missing (i.e. the 5′ flanking sequence comprises affinity enhancing alternative nucleosides) and for tailmers the 5′ flanking sequence is missing (i.e. the 3′ flanking sequence comprises affinity enhancing alternative nucleosides). A “mixed flanking sequence gapmer” refers to a gapmer wherein the flanking sequences comprise at least one alternative nucleoside, such as at least one DNA nucleoside or at least one 2′ substituted alternative nucleoside, such as, for example, 2′-O-alkyl-RNA, 2′-O-methyl-RNA, 2′-alkoxy-RNA, 2′-O-methoxyethyl-RNA (MOE), 2′-amino-DNA, 2′-Fluoro-RNA, 2′-F-ANA nucleoside(s), or bicyclic nucleosides (e.g., locked nucleosides or constrained ethyl (cEt) nucleosides). In some aspects the mixed flanking sequence gapmer has one flanking sequence which comprises alternative nucleosides (e.g. 5′ or 3′) and the other flanking sequence (3′ or 5′ respectfully) comprises 2′ substituted alternative nucleoside(s).

[0075] A “linker” or “linking group” is a connection between two atoms that links one chemical group or segment of interest to another chemical group or segment of interest via one or more covalent bonds. The oligonucleotides disclosed herein can comprise one or more linkers capable of linking one or more oligonucleotides disclosed herein to one or more other oligonucleotides disclosed herein, and/or to any other oligonucleotide, and/or to any conjugate moiety. For example, a linker could be used to link an oligonucleotide disclosed herein to an oligonucleotide that targets the Huntingtin gene.

[0076] Linkers may be susceptible to cleavage (“cleavable linker”) thereby facilitating release of the different oligonucleotides and/or different conjugate moieties disclosed herein. Such cleavable linkers may be susceptible, for example, to nuclease-induced cleavage, acid-induced cleavage, photo-induced cleavage, peptidase-induced cleavage, esterase-induced cleavage, and disulfide bond cleavage, at suitable conditions. Suitable cleavable linking groups for use in cleavable linkers include those which are sufficiently stable outside the cell, but which upon entry into a target cell is cleaved to release the two parts the linker is holding together.

[0077] Alternatively, linkers may be substantially resistant to cleavage (“non-cleavable linker”). Such non-cleavable linkers can be any chemical moiety capable of linking one or more different oligonucleotides disclosed herein to one or more other oligonucleotides disclosed herein, and/or to any conjugate moiety in a stable, covalent manner and does not fall off under the categories listed above for cleavable linkers. Thus, non-cleavable linkers are substantially resistant to acid-induced cleavage, nuclease-induced cleavage, photo-induced cleavage, peptidase-induced cleavage, esterase-induced cleavage and disulfide bond cleavage. Furthermore, non-cleavable refers to the ability of the chemical bond in the linker or adjoining to the linker to withstand cleavage induced by an acid, a nuclease, photolabile-cleaving agent, a peptidase, an esterase, or a chemical or physiological compound that cleaves a disulfide bond, at conditions under which the oligonucleotides disclosed herein do not lose their activity or intended purpose.

[0078] Conjugate moieties can be attached to the oligonucleotide directly or through a linking moiety (e.g. linker or tether). Linkers serve to covalently connect a third region, e.g. a conjugate moiety to an oligonucleotide (e.g. the termini of region A or C). In some aspects, the conjugate or oligonucleotide conjugate can, comprise a linker region which is positioned between the oligonucleotide and the conjugate moiety. In some aspects, the linker between the conjugate and oligonucleotide is biocleavable. Phosphodiester containing biocleavable linkers are described in more detail in WO 2014/076195 (herein incorporated by reference).

[0079] In some aspects, two or more linkers can be linked in tandem. When multiple linkers connect one or more oligonucleotides disclosed herein to one or more other oligonucleotides disclosed herein, and/or to any conjugate moiety, each of the linkers can be the same or different.

[0080] As used herein, and unless otherwise indicated, the term “complementary,” when used to describe a first nucleotide or nucleoside sequence in relation to a second nucleotide or nucleoside sequence, refers to the ability of an oligonucleotide or polynucleotide comprising the first nucleotide or nucleoside sequence to hybridize and form a duplex structure under certain conditions with an oligonucleotide or polynucleotide comprising the second nucleotide sequence, as will be understood by the skilled person. Such conditions can, for example, be stringent conditions, where stringent conditions can include: 400 mM NaCl, 40 mM PIPES pH 6.4, 1 mM EDTA, 50° C., or 70° C., for 12-16 hours followed by washing (see, e.g., “Molecular Cloning: A Laboratory Manual, Sambrook, et al. (1989) Cold Spring Harbor Laboratory Press). Other conditions, such as physiologically relevant conditions as can be encountered inside an organism, can be used. The skilled person will be able to determine the set of conditions most appropriate for a test of complementarity of two sequences in accordance with the ultimate application of the hybridized nucleotides or nucleosides.

[0081] “Complementary” sequences, as used herein, can include, or be formed entirely from, non-Watson-Crick base pairs and/or base pairs formed from non-natural and alternative nucleotides or nucleosides, in so far as the above requirements with respect to their ability to hybridize are fulfilled. Such non-Watson-Crick base pairs include, but are not limited to, G:U Wobble or Hoogstein base pairing. Complementary sequences between an oligonucleotide and a target sequence as described herein, include base-pairing of the oligonucleotide or polynucleotide comprising a first nucleotide or nucleoside sequence to an oligonucleotide or polynucleotide comprising a second nucleotide or nucleoside sequence over the entire length of one or both nucleotide or nucleoside sequences. Such sequences can be referred to as “fully complementary” with respect to each other herein. However, where a first sequence is referred to as “substantially complementary” with respect to a second sequence herein, the two sequences can be fully complementary, or they can form one or more, but generally not more than 5, 4, 3 or 2 mismatched base pairs upon hybridization for a duplex up to 30 base pairs, while retaining the ability to hybridize under the conditions most relevant to their ultimate application, e.g., inhibition of gene expression via an RNase H-mediated pathway. “Substantially complementary” can refer to a polynucleotide that is substantially complementary to a contiguous portion of the mRNA of interest (e.g., an mRNA encoding MSH3). For example, a polynucleotide is complementary to at least a part of a MSH3 mRNA if the sequence is substantially complementary to a non-interrupted portion of an mRNA encoding MSH3.

[0082] As used herein, the term “region of complementarity” refers to the region on the oligonucleotide that is substantially complementary to all or a portion of a gene, primary transcript, a sequence (e.g., a target sequence, e.g., an MSH3 nucleotide sequence), or processed mRNA, so as to interfere with expression of the endogenous gene (e.g., MSH3). Where the region of complementarity is not fully complementary to the target sequence, the mismatches can be in the internal or terminal regions of the molecule. Generally, the most tolerated mismatches are in the terminal regions, e.g., within 5, 4, 3, or 2 nucleotides of the 5′- and/or 3′-terminus of the oligonucleotide.

[0083] As used herein, an “agent that reduces the level and/or activity of MSH3” refers to any polynucleotide agent (e.g., an oligonucleotide, e.g., an ASO) that reduces the level of or inhibits expression of MSH3 in a cell or subject. The phrase “inhibiting expression of MSH3,” as used herein, includes inhibition of expression of any MSH3 gene (such as, e.g., a mouse MSH3 gene, a rat MSH3 gene, a monkey MSH3 gene, or a human MSH3 gene) as well as variants or mutants of a MSH3 gene that encode a MSH3 protein. Thus, the MSH3 gene can be a wild-type MSH3 gene, a mutant MSH3 gene, or a transgenic MSH3 gene in the context of a genetically manipulated cell, group of cells, or organism.

[0084] By “reducing the activity of MSH3” is meant decreasing the level of an activity related to MSH3 (e.g., by reducing the amount of nucleotide repeats in a gene associated with a nucleotide repeat expansion disorder, e.g., a trinucleotide repeat expansion disorder, that is related to MSH3 activity). The activity level of MSH3 can be measured using any method known in the art (e.g., by directly sequencing a gene associated with a nucleotide repeat expansion disorder to measure the levels of nucleotide repeats).

[0085] By “reducing the level of MSH3” is meant decreasing the level of MSH3 in a cell or subject, e.g., by administering an oligonucleotide, or pharmaceutically acceptable salt thereof, to the cell or subject. The level of MSH3 can be measured using any method known in the art (e.g., by measuring the levels of MSH3 mRNA or levels of MSH3 protein in a cell or a subject).

[0086] By “modulating the activity of a MutSP heterodimer comprising MSH3” is meant altering the level of an activity related to a MutSP heterodimer, or a related downstream effect. The activity level of a MutSP heterodimer can be measured using any method known in the art.

[0087] As used herein, the term “inhibitor” refers to any agent which reduces the level and/or activity of a protein (e.g., MSH3). Non-limiting examples of inhibitors include polynucleotides (e.g., oligonucleotide, e.g., ASOs). The term “inhibiting,” as used herein, is used interchangeably with “reducing,” “silencing,” “downregulating,” “suppressing,” and other similar terms, and includes any level of inhibition.

[0088] The phrase “contacting a cell with an oligonucleotide,” such as an oligonucleotide, as used herein, includes contacting a cell by any possible means. Contacting a cell with an oligonucleotide includes contacting a cell in vitro with the oligonucleotide or contacting a cell in vivo with the oligonucleotide. The contacting can be done directly or indirectly. Thus, for example, the oligonucleotide can be put into physical contact with the cell by the individual performing the method, or alternatively, the oligonucleotide agent can be put into a situation that will permit or cause it to subsequently come into contact with the cell.

[0089] Contacting a cell in vitro can be done, for example, by incubating the cell with the oligonucleotide. Contacting a cell in vivo can be done, for example, by injecting the oligonucleotide into or near the tissue where the cell is located, or by injecting the oligonucleotide agent into another area, e.g., the bloodstream or the subcutaneous space, such that the agent will subsequently reach the tissue where the cell to be contacted is located. For example, the oligonucleotide can contain and/or be coupled to a ligand, e.g., GalNAc3, that directs the oligonucleotide to a site of interest, e.g., the liver.

[0090] Combinations of in vitro and in vivo methods of contacting are also possible. For example, a cell can be contacted in vitro with an oligonucleotide and subsequently transplanted into a subject.

[0091] In one aspect, contacting a cell with an oligonucleotide includes “introducing” or “delivering the oligonucleotide into the cell” by facilitating or effecting uptake or absorption into the cell. Absorption or uptake of an ASO can occur through unaided diffusive or active cellular processes, or by auxiliary agents or devices. Introducing an oligonucleotide into a cell can be in vitro and/or in vivo. For example, for in vivo introduction, oligonucleotides can be injected into a tissue site or administered systemically. In vitro introduction into a cell includes methods known in the art such as electroporation and lipofection. Further approaches are described herein below and/or are known in the art.

[0092] As used herein, “lipid nanoparticle” or “LNP” is a vesicle comprising a lipid layer encapsulating a pharmaceutically active molecule, such as a nucleic acid molecule, e.g., an oligonucleotide. LNP refers to a stable nucleic acid-lipid particle. LNPs typically contain a cationic lipid, a non-cationic lipid, and a lipid that prevents aggregation of the particle (e.g., a PEG-lipid conjugate). LNPs are described in, for example, U.S. Pat. Nos. 6,858,225; 6,815,432; 8,158,601; and 8,058,069, the entire contents of which are hereby incorporated herein by reference.

[0093] As used herein, the term “liposome” refers to a vesicle composed of amphiphilic lipids arranged in at least one bilayer, e.g., one bilayer or a plurality of bilayers. Liposomes include unilamellar and multilamellar vesicles that have a membrane formed from a lipophilic material and an aqueous interior. The aqueous portion contains the oligonucleotide composition. The lipophilic material isolates the aqueous interior from an aqueous exterior, which typically does not include the oligonucleotide composition, although in some examples, it can. Liposomes also include “sterically stabilized” liposomes, a term which, as used herein, refers to liposomes comprising one or more specialized lipids that, when incorporated into liposomes, result in enhanced circulation lifetimes relative to liposomes lacking such specialized lipids.

[0094] “Micelles” are defined herein as a particular type of molecular assembly in which amphipathic molecules are arranged in a spherical structure such that all the hydrophobic portions of the molecules are directed inward, leaving the hydrophilic portions in contact with the surrounding aqueous phase. The converse arrangement exists if the environment is hydrophobic.

[0095] The term “antisense,” as used herein, refers to a nucleic acid comprising an oligonucleotide or polynucleotide that is sufficiently complementary to all or a portion of a gene, primary transcript, or processed mRNA, so as to interfere with expression of the endogenous gene (e.g., MSH3). “Complementary” polynucleotides are those that are capable of base pairing according to the standard Watson-Crick complementarity rules. Specifically, purines will base pair with pyrimidines to form a combination of guanine paired with cytosine (G:C) and adenine paired with either thymine (A:T) in the case of DNA, or adenine paired with uracil (A:U) in the case of RNA. It is understood that two polynucleotides can hybridize to each other even if they are not completely complementary to each other, provided that each has at least one region that is substantially complementary to the other.

[0096] As used herein, the terms “effective amount,” “therapeutically effective amount,” and “a “sufficient amount” of an agent that reduces the level and/or activity of MSH3 (e.g., in a cell or a subject) described herein refer to a quantity sufficient to, when administered to the subject, including a human, effect beneficial or desired results, including clinical results, and, as such, an “effective amount” or synonym thereto depends on the context in which it is being applied. For example, in the context of treating a nucleotide repeat expansion disorder (e.g., a trinucleotide repeat expansion disorder), it is an amount of the agent that reduces the level and/or activity of MSH3 sufficient to achieve a treatment response as compared to the response obtained without administration of the agent that reduces the level and/or activity of MSH3. The amount of a given agent that reduces the level and/or activity of MSH3 described herein that will correspond to such an amount will vary depending upon various factors, such as the given agent, the pharmaceutical formulation, the route of administration, the type of disease or disorder, the identity of the subject (e.g., age, sex, and/or weight) or host being treated, and the like, but can nevertheless be routinely determined by one of skill in the art. Also, as used herein, a “therapeutically effective amount” of an agent that reduces the level and/or activity of MSH3 of the present disclosure is an amount which results in a beneficial or desired result in a subject as compared to a control. As defined herein, a therapeutically effective amount of an agent that reduces the level and/or activity of MSH3 of the present disclosure can be readily determined by one of ordinary skill by routine methods known in the art. Dosage regimen can be adjusted to provide the optimum therapeutic response.

[0097] “Prophylactically effective amount,” as used herein, is intended to include the amount of an oligonucleotide that, when administered to a subject having or predisposed to have a nucleotide repeat expansion disorder (e.g., a trinucleotide repeat expansion disorder), is sufficient to prevent or ameliorate the disease or one or more symptoms of the disease. Ameliorating the disease includes slowing the course of the disease or reducing the severity of later-developing disease. The “prophylactically effective amount” can vary depending on the oligonucleotide, how the agent is administered, the degree of risk of disease, and the history, age, weight, family history, genetic makeup, the types of preceding or concomitant treatments, if any, and other individual characteristics of the patient to be treated. A prophylactically effective amount can refer to, for example, an amount of the agent that reduces the level and/or activity of MSH3 (e.g., in a cell or a subject) described herein or can refer to a quantity sufficient to, when administered to the subject, including a human, delay the onset of one or more of the nucleotide repeat disorders (e.g., trinucleotide repeat expansion disorders) described herein by at least 120 days, for example, at least 6 months, at least 12 months, at least 2 years, at least 3 years, at least 4 years, at least 5 years, at least 10 years or more, when compared with the predicted onset.

[0098] A “therapeutically-effective amount” or “prophylactically effective amount” also includes an amount (either administered in a single or in multiple doses) of an oligonucleotide that produces some desired local or systemic effect at a reasonable benefit/risk ratio applicable to any treatment. Oligonucleotides employed in the methods herein can be administered in a sufficient amount to produce a reasonable benefit/risk ratio applicable to such treatment.

[0099] As used herein, the term “region of complementarity” refers to the region on the oligonucleotide that is substantially complementary to all or a portion of a gene, primary transcript, a sequence (e.g., a target sequence, e.g., an MSH3 nucleotide sequence), or processed mRNA, so as to interfere with expression of the endogenous gene (e.g., MSH3). Where the region of complementarity is not fully complementary to the target sequence, the mismatches can be in the internal or terminal regions of the molecule. Generally, the most tolerated mismatches are in the terminal regions, e.g., within 5, 4, 3, or 2 nucleotides of the 5′- and/or 3′-terminus of the oligonucleotide.

[0100] An “amount effective to reduce nucleotide repeat expansion” of a particular gene refers to an amount of the agent that reduces the level and/or activity of MSH3 (e.g., in a cell or a subject) described herein, orto a quantity sufficient to, when administered to the subject, including a human, to reduce the nucleotide repeat expansion of a particular gene (e.g., a gene associated with a nucleotide repeat expansion disorder, e.g., a trinucleotide repeat expansion disorder, described herein).

[0101] As used herein, the term “a subject identified as having a nucleotide repeat expansion disorder” refers to a subject identified as having a molecular or pathological state, disease or condition of or associated with a nucleotide repeat expansion disorder, such as the identification of a nucleotide repeat expansion disorder or symptoms thereof, or to identification of a subject having or suspected of having a nucleotide repeat expansion disorder who can benefit from a particular treatment regimen.

[0102] As used herein, “trinucleotide repeat expansion disorder” refers to a class of genetic diseases or disorders characterized by excessive trinucleotide repeats (e.g., trinucleotide repeats such as CAG) in a gene or intron in the subject which exceed the normal, stable threshold, for the gene or intron. Nucleotide repeats are common in the human genome and are not normally associated with disease. In some cases, however, the number of repeats expands beyond a stable threshold and can lead to disease, with the severity of symptoms generally correlated with the number of repeats. Nucleotide repeat expansion disorders include “polyglutamine” and “non-polyglutamine” disorders.

[0103] By “determining the level of a protein” is meant the detection of a protein, or an mRNA encoding the protein, by methods known in the art either directly or indirectly. “Directly determining” means performing a process (e.g., performing an assay or test on a sample or “analyzing a sample” as that term is defined herein) to obtain the physical entity or value. “Indirectly determining” refers to receiving the physical entity or value from another party or source (e.g., a third-party laboratory that directly acquired the physical entity or value). Methods to measure protein level generally include, but are not limited to, western blotting, immunoblotting, enzyme-linked immunosorbent assay (ELISA), radioimmunoassay (RIA), immunoprecipitation, immunofluorescence, surface plasmon resonance, chemiluminescence, fluorescent polarization, phosphorescence, immunohistochemical analysis, matrix-assisted laser desorption/ionization time-of-flight (MALDI-TOF) mass spectrometry, liquid chromatography (LC)-mass spectrometry, microcytometry, microscopy, fluorescence activated cell sorting (FACS), and flow cytometry, as well as assays based on a property of a protein including, but not limited to, enzymatic activity or interaction with other protein partners. Methods to measure mRNA levels are known in the art.

[0104] “Percent (%) sequence identity” with respect to a reference polynucleotide or polypeptide sequence is defined as the percentage of nucleic acids or amino acids in a candidate sequence that are identical to the nucleic acids or amino acids in the reference polynucleotide or polypeptide sequence, after aligning the sequences and introducing gaps (DNA core sequences), if necessary, to achieve the maximum percent sequence identity. Alignment for purposes of determining percent nucleic acid or amino acid sequence identity can be achieved in various ways that are within the capabilities of one of skill in the art, for example, using publicly available computer software such as BLAST, BLAST-2, or Megalign software. Those skilled in the art can determine appropriate parameters for aligning sequences, including any algorithms needed to achieve maximal alignment over the full length of the sequences being compared. For example, percent sequence identity values can be generated using the sequence comparison computer program BLAST. As an illustration, the percent sequence identity of a given nucleic acid or amino acid sequence, A, to, with, or against a given nucleic acid or amino acid sequence, B, (which can alternatively be phrased as a given nucleic acid or amino acid sequence, A that has a certain percent sequence identity to, with, or against a given nucleic acid or amino acid sequence, B) is calculated as follows:

100 multiplied by (the fraction X/Y)

where X is the number of nucleotides or amino acids scored as identical matches by a sequence alignment program (e.g., BLAST) in that program's alignment of A and B, and where Y is the total number of nucleic acids in B. It will be appreciated that where the length of nucleic acid or amino acid sequence A is not equal to the length of nucleic acid or amino acid sequence B, the percent sequence identity of A to B will not equal the percent sequence identity of B to A.

[0105] By “level” is meant a level or activity of a protein, or mRNA encoding the protein (e.g., MSH3), optionally as compared to a reference. The reference can be any useful reference, as defined herein. By a “decreased level” or an “increased level” of a protein is meant a decrease or increase in protein level, as compared to a reference (e.g., a decrease or an increase by about 5%, about 10%, about 15%, about 20%, about 25%, about 30%, about 35%, about 40%, about 45%, about 50%, about 55%, about 60%, about 65%, about 70%, about 75%, about 80%, about 85%, about 90%, about 95%, about 100%, about 150%, about 200%, about 300%, about 400%, about 500%, or more; a decrease or an increase of more than 10%, 15%, 20%, 50%, 75%, 100%, or 200%, as compared to a reference; a decrease or an increase by less than 0.01-fold, 0.02-fold, 0.1-fold, 0.3-fold, 0.5-fold, 0.8-fold, or less; or an increase by more than 1.2-fold, 1.4-fold, 1.5-fold, 1.8-fold, 2.0-fold, 3.0-fold, 3.5-fold, 4.5-fold, 5.0-fold, 10-fold, 15-fold, 20-fold, 30-fold, 40-fold, 50-fold, 100-fold, 1000-fold, or more). A level of a protein can be expressed in mass/vol (e.g., g/dL, mg/mL, g/mL, or ng/mL) or percentage relative to total protein or mRNA in a sample.

[0106] The term “pharmaceutical composition,” as used herein, represents a composition containing a compound described herein formulated with a pharmaceutically acceptable excipient, and can be manufactured or sold with the approval of a governmental regulatory agency as part of a therapeutic regimen for the treatment of disease in a mammal. Pharmaceutical compositions can be formulated, for example, for oral administration in unit dosage form (e.g., a tablet, capsule, caplet, gelcap, or syrup); for topical administration (e.g., as a cream, gel, lotion, or ointment); for intravenous administration (e.g., as a sterile solution free of particulate emboli and in a solvent system suitable for intravenous use); for intrathecal injection; for intracerebroventricular injections; for intraparenchymal injection; for intraocular administration (e.g., for intravitreal or subretinal administration); or in any other pharmaceutically acceptable formulation.

[0107] A “pharmaceutically acceptable excipient,” as used herein, refers any ingredient other than the compounds described herein (for example, a vehicle capable of suspending or dissolving the active compound) and having the properties of being substantially nontoxic and non-inflammatory in a patient. Excipients can include, for example: antiadherents, antioxidants, binders, coatings, compression aids, disintegrants, dyes (colors), emollients, emulsifiers, fillers (diluents), film formers or coatings, flavors, fragrances, glidants (flow enhancers), lubricants, preservatives, printing inks, sorbents, suspensing or dispersing agents, sweeteners, and waters of hydration. Exemplary excipients include, but are not limited to: butylated hydroxytoluene (BHT), calcium carbonate, calcium phosphate (dibasic), calcium stearate, croscarmellose, crosslinked polyvinyl pyrrolidone, citric acid, crospovidone, cysteine, ethylcellulose, gelatin, hydroxypropyl cellulose, hydroxypropyl methylcellulose, lactose, magnesium stearate, maltitol, mannitol, methionine, methylcellulose, methyl paraben, microcrystalline cellulose, polyethylene glycol, polyvinyl pyrrolidone, povidone, pregelatinized starch, propyl paraben, retinyl palmitate, shellac, silicon dioxide, sodium carboxymethyl cellulose, sodium citrate, sodium starch glycolate, sorbitol, starch (corn), stearic acid, sucrose, talc, titanium dioxide, vitamin A, vitamin E, vitamin C, and xylitol.

[0108] As used herein, the term “pharmaceutically acceptable salt” means any pharmaceutically acceptable salt of the compound of any of the compounds described herein. For example, pharmaceutically acceptable salts of any of the compounds described herein include those that are within the scope of sound medical judgment, suitable for use in contact with the tissues of humans and animals without undue toxicity, irritation, allergic response and are commensurate with a reasonable benefit/risk ratio. Pharmaceutically acceptable salts are well known in the art. For example, pharmaceutically acceptable salts are described in: Berge et al., J. Pharmaceutical Sciences 66:1-19, 1977 and in Pharmaceutical Salts: Properties, Selection, and Use, (Eds. P. H. Stahl and C.G. Wermuth), Wiley-VCH, 2008. The salts can be prepared in situ during the final isolation and purification of the compounds described herein or separately by reacting a free base group with a suitable organic acid.

[0109] The compounds described herein can have ionizable groups so as to be capable of preparation as pharmaceutically acceptable salts. These salts can be acid addition salts involving inorganic or organic acids or the salts can, in the case of acidic forms of the compounds described herein, be prepared from inorganic or organic bases. Frequently, the compounds are prepared or used as pharmaceutically acceptable salts prepared as addition products of pharmaceutically acceptable acids or bases. Suitable pharmaceutically acceptable acids and bases and methods for preparation of the appropriate salts are well-known in the art. Salts can be prepared from pharmaceutically acceptable non-toxic acids and bases including inorganic and organic acids and bases. Representative acid addition salts include acetate, adipate, alginate, ascorbate, aspartate, benzenesulfonate, benzoate, bisulfate, borate, butyrate, camphorate, camphorsulfonate, citrate, cyclopentanepropionate, digluconate, dodecylsulfate, ethanesulfonate, fumarate, glucoheptonate, glycerophosphate, hemisulfate, heptonate, hexanoate, hydrobromide, hydrochloride, hydroiodide, 2-hydroxy-ethanesulfonate, lactobionate, lactate, laurate, lauryl sulfate, malate, maleate, malonate, methanesulfonate, 2-naphthalenesulfonate, nicotinate, nitrate, oleate, oxalate, palmitate, pamoate, pectinate, persulfate, 3-phenylpropionate, phosphate, picrate, pivalate, propionate, stearate, succinate, sulfate, tartrate, thiocyanate, toluenesulfonate, undecanoate, and valerate salts. Representative alkali or alkaline earth metal salts include sodium, lithium, potassium, calcium, and magnesium, as well as nontoxic ammonium, quaternary ammonium, and amine cations, including, but not limited to ammonium, tetramethylammonium, tetraethylammonium, methylamine, dimethylamine, trimethylamine, triethylamine, and ethylamine.

[0110] By a “reference” is meant any useful reference used to compare protein or mRNA levels or activity. The reference can be any sample, standard, standard curve, or level that is used for comparison purposes. The reference can be a normal reference sample or a reference standard or level. A “reference sample” can be, for example, a control, e.g., a predetermined negative control value such as a “normal control” or a prior sample taken from the same subject; a sample from a normal healthy subject, such as a normal cell or normal tissue; a sample (e.g., a cell or tissue) from a subject not having a disease; a sample from a subject that is diagnosed with a disease, but not yet treated with a compound described herein; a sample from a subject that has been treated by a compound described herein; or a sample of a purified protein (e.g., any described herein) at a known normal concentration. By “reference standard or level” is meant a value or number derived from a reference sample. A “normal control value” is a pre-determined value indicative of non-disease state, e.g., a value expected in a healthy control subject. Typically, a normal control value is expressed as a range (“between X and Y”), a high threshold (“no higher than X”), or a low threshold (“no lower than X”). A subject having a measured value within the normal control value for a particular biomarker is typically referred to as “within normal limits” for that biomarker. A normal reference standard or level can be a value or number derived from a normal subject not having a disease or disorder (e.g., a nucleotide or trinucleotide repeat expansion disorder); a subject that has been treated with a compound described herein. In some aspects, the reference sample, standard, or level is matched to the sample subject sample by at least one of the following criteria: age, weight, sex, disease stage, and overall health. A standard curve of levels of a purified protein, e.g., any described herein, within the normal reference range can be used as a reference.

[0111] As used herein, the term “subject” refers to any organism to which a composition can be administered, e.g., for experimental, diagnostic, prophylactic, and/or therapeutic purposes. Typical subjects include any animal (e.g., mammals such as mice, rats, rabbits, non-human primates, and humans). A subject can seek or be in need of treatment, require treatment, be receiving treatment, be receiving treatment in the future, or be a human or animal who is under care by a trained professional for a particular disease or condition.

[0112] As used herein, the terms “treat,” “treated,” and “treating” mean both therapeutic treatment and prophylactic or preventative measures wherein the object is to prevent or slow down (lessen) an undesired physiological condition, disorder, or disease, or obtain beneficial or desired clinical results. Beneficial or desired clinical results include, but are not limited to, alleviation of symptoms; diminishment of the extent of a condition, disorder, or disease; stabilized (i.e., not worsening) state of condition, disorder, or disease; delay in onset or slowing of condition, disorder, or disease progression; amelioration of the condition, disorder, or disease state or remission (whether partial or total), whether detectable or undetectable; an amelioration of at least one measurable physical parameter, not necessarily discernible by the patient; or enhancement or improvement of condition, disorder, or disease. Treatment includes eliciting a clinically significant response without excessive levels of side effects. Treatment also includes prolonging survival as compared to expected survival if not receiving treatment.

[0113] As used herein, the terms “variant” and “derivative” are used interchangeably and refer to naturally-occurring, synthetic, and semi-synthetic analogues of a compound, peptide, protein, or other substance described herein. A variant or derivative of a compound, peptide, protein, or other substance described herein can retain or improve upon the biological activity of the original material.

[0114] The details of one or more aspects are set forth in the description below. Other features, objects, and advantages will be apparent from the description and from the claims.

### DETAILED DESCRIPTION

[0115] The present inventors have found that inhibition or depletion of MSH3 level and/or activity in a cell is effective in the treatment of a nucleotide repeat expansion disorder (e.g., a trinucleotide repeat expansion disorder). Accordingly, useful compositions and methods to treat nucleotide repeat expansion disorders (e.g., a trinucleotide repeat expansion disorder), e.g., in a subject in need thereof are provided herein.

### I. Nucleotide Repeat Expansion Disorders

[0116] Nucleotide repeat expansion disorders (e.g., trinucleotide repeat expansion disorders) are a family of genetic disorders characterized by the pathogenic expansion of a repeat region within a genomic region. In such disorders, the number of repeats exceeds that of a gene's normal, stable threshold, expanding into a diseased range.

[0117] Nucleotide repeat expansion disorders (e.g., trinucleotide repeat expansion disorders) generally can be categorized as “polyglutamine” or “non-polyglutamine.” Polyglutamine disorders, including Huntington's disease (HD) and several spinocerebellar ataxias, are caused by a CAG (glutamine) repeats in the protein-coding regions of specific genes. Non-polyglutamine disorders are more heterogeneous and can be caused by CAG nucleotide repeat expansions in non-coding regions, as in Myotonic dystrophy, or by the expansion of nucleotide repeats other than CAG that can be in coding or non-coding regions such as the CGG repeat expansion responsible for Fragile X Syndrome.

[0118] Nucleotide repeat expansion disorders (e.g., trinucleotide repeat expansion disorders) are dynamic in the sense that the number of repeats can vary from generation-to-generation, or even from cell-to-cell in the same individual. Repeat expansion is believed to be caused by polymerase “slipping” during DNA replication. Tandem repeats in the DNA sequence can “loop out” while maintaining complementary base pairing between the parent strand and daughter strands. If the loop structure is formed from the daughter strand, the number of repeats will increase.

[0119] Conversely, if the loop structure is formed from the parent strand, the number of repeats will decrease. It appears that expansion is more common than reduction. In general, the length of repeat expansion is negatively correlated with prognosis; longer repeats are correlated with an earlier age of onset and worsened disease severity. Thus, nucleotide repeat expansion disorders (e.g., trinucleotide repeat expansion disorders) are subject to “anticipation,” meaning the severity of symptoms and/or age of onset worsen through successive generations of affected families due to the expansion of these repeats from one generation to the next.

[0120] Nucleotide repeat expansion disorders (e.g., trinucleotide repeat expansion disorders) are well known in the art. For example, frontotemporal dementia (FTD) is a hexanucleotide repeat string ofnucleotides GGGGCC that is repeated many more times in an individual than an individual without FTD. Additionally, an individual having spinocerebellar ataxia type 36 (SCA36) has many more GGCCTG repeats than an individual without SCA36.

[0121] Exemplary trinucleotide repeat expansion disorders and the trinucleotide repeats of the genes commonly associated with them are included in Table 1.

TABLE 1
Exemplary Trinucleotide Repeat Expansion Disorders

| | | Nucleotide |
|---|---|---|
| Disease | Gene | Repeat |
| ARX-nonsyndromic X-linked mental | ARX | GCG |
| retardation (XLMR) | | |
| Baratela-Scott Syndrome | XYLT1 | GGC |
| Blepharophimosis/Ptosis/Epicanthus | FOXL2 | GCG |
| inversus syndrome type II | | |
| Cleidocranial dysplasia (CCD) | RUNX2 | GCG |
| Congenital central hypoventilation | PHOX-2B | GCG |
| Congenital central hypoventilation | PHOX2B | GCG |
| syndrome (CCHS) | | |
| Creutzfeldt-Jakob disease | PRNP | |
| Dentatorubral-pallidoluysian atrophy | ATN1 | CAG |
| (DRPLA)/Haw River syndrome | | |
| Early infantile epileptic | ARX | GCG |
| encephalopathy (Ohtahara syndrome) | | |
| FRA2A syndrome | AFF3 | CGC |
| FRA7A syndrome | ZNF713 | CGG |
| Fragile X mental retardation (FRAX-E) | AFF2/FMR2 | GCC |
| Fragile X Syndrome (FXS) | FMR1 | CGG |
| Fragile X-associated Primary Ovarian | FMR1 | CGG |
| Insufficiency (FXPOI) | | |
| Fragile X-associated Tremor Ataxia | FMR1 | CGG |
| Syndrome (FXTAS) | | |
| Friedreich ataxia (FRDA) | FXN | GAA |
| Fuchs' Corneal Endothelial Dystrophy | TCF4 | CTG |
| (FECD) | | |
| Hand-foot genital syndrome (HFGS) | HOXA13 | GCG |
| Holoprosencephaly disorder (HPE) | ZIC2 | GCG |
| Huntington disease-like 2 (HDL2) | JPH3 | CTG |
| Huntington's Disease (HD) | HTT | CAG |
| Infantile spasm syndrome/West | ARX | GCG |
| syndrome (ISS) | | |
| Jacobsen syndrome | | |
| KCNN3-associated (e.g., | KCNN3 | CAG |
| schizophrenia) | | |
| Multiple Skeletal dysplasias | COMP | GAC |
| Myotonic Dystrophy type 1 (DM1) | DMPK | CTG |
| Myotonic Dystrophy type 2 (DM2) | CNBP | CCTG |
| NCOA3-associated (e.g., increased risk | NCOA3 | CAG |
| of prostate cancer) | | |
| Neuronal intranuclear inclusion disease | NOTCH2NLC | GGC |
| (NIID) | | |
| Oculopharyngeal Muscular Dystrophy | PABPN1 | GCG |
| (OPMD) | | |
| Spastic ataxia-Charlevoix-Saguenay | | |
| Spinal Muscular Bulbar Atrophy | AR | CAG |
| (SMBA) | | |
| Spinocerebellar ataxia type 1 (SCA1) | ATXN1 | CAG |
| Spinocerebellar ataxia type 10 | ATXN10 | ATTCT |
| (SCA10) | | |
| Spinocerebellar ataxia type 12 | PPP2R2B | CAG |
| (SCA12) | | |
| Spinocerebellar ataxia type 17 | TBP/ATXN17 | CAG |
| (SCA17) | | |
| Spinocerebellar ataxia type 2 (SCA2) | ATXN2 | CAG |
| Spinocerebellar ataxia type 3 (SCA3)/ | ATXN3 | CAG |
| Machado-Joseph Disease | | |
| Spinocerebellar ataxia type 45 | FAT2 | CAG |
| (SCA45) | | |
| Spinocerebellar ataxia type 6 (SCA6) | CACNA1A | CAG |
| Spinocerebellar ataxia type 7 (SCA7) | ATXN7 | CAG |
| Spinocerebellar ataxia type 8 (SCA8) | ATXN8 | CTG |
| Syndromic neurodevelopmental | MAB21L1 | CAG |
| disorder with cerebellar, ocular, | | |
| craniofacial, and genital features | | |
| (COFG syndrome) | | |
| Synpolydactyly (SPD I) | HOXD13 | GCG |
| Synpolydactyly (SPD II) | HOXD12 | GCG |

[0122] The proteins associated with nucleotide repeat expansion disorders (e.g., trinucleotide repeat expansion disorders) are typically selected based on an experimental association of the protein associated with a nucleotide repeat expansion disorder (e.g., a trinucleotide repeat expansion disorder) to a nucleotide repeat expansion disorder. For example, the production rate or circulating concentration of a protein associated with a nucleotide repeat expansion disorder (e.g., trinucleotide repeat expansion disorder) can be elevated or depressed in a population having a nucleotide repeat expansion disorder (e.g., a trinucleotide repeat expansion disorder) relative to a population lacking the nucleotide repeat expansion disorder (e.g., trinucleotide repeat expansion disorder). Differences in protein levels can be assessed using proteomic techniques including but not limited to Western blot, immunohistochemical staining, enzyme linked immunosorbent assay (ELISA), and mass spectrometry. Alternatively, the proteins associated with nucleotide repeat expansion disorders (e.g., trinucleotide repeat expansion disorders) can be identified by obtaining gene expression profiles of the genes encoding the proteins using genomic techniques including, but not limited to, DNA microarray analysis, serial analysis of gene expression (SAGE), and quantitative real-time polymerase chain reaction (qPCR).

### II. Evidence for the Involvement of Mismatch Repair Pathway in Nucleotide Repeat Expansion

[0123] There is growing evidence that DNA repair pathways, particularly mismatch repair (MMR), are involved in the expansion of nucleotide repeats (e.g., trinucleotide repeats). A recent genome-wide association (GWA) analysis led to the identification of loci harboring genetic variations that alter the age at neurological onset of Huntington's disease (HD) (GEM-HD Consortium, Cell. 2015 Jul. 30; 162(3):516-26). The study identified MLH1, the human homolog of the E. coli DNA mismatch repair gene mutL. A subsequent GWA study in polyglutamine disease patients found significant association of age at onset when grouping all polyglutamine diseases (HD and SCAs) with DNA repair genes as a group, as well as significant associations for specific SNPs in FAN1 and PMS2 with the diseases (Bettencourt et al., (2016) Ann. Neurol, 79: 983-990). These results were consistent with those from an earlier study comparing differences in repeat expansion in two different mouse models of Huntington's Disease, which identified Mlh1 and Mlh3 as novel critical modifiers of CAG instability (Pinto et al., (2013) Mismatch Repair Genes Mlh1 and Mlh3 Modify CAG Instability in Huntington's Disease Mice: Genome-Wide and Candidate Approaches. PLoS Genet 9(10): e1003930). Another member of the mismatch repair pathway, 8-oxo-guanine glycosylase (OGG1) has also been implicated in expansion, as somatic expansion was found to be reduced in transgenic mice lacking OGG1 (Kovtun I. V. et al. (2007) Nature 447, 447-452). However, another study found that human subjects containing a Ser326Cys polymorphism in hOGG1, which results in reduced OGG1 activity, results in increased mutant huntingtin (Coppede et al., (2009) Toxicol., 278: 199-203). Likewise, complete inactivation of Fan1, another component of the DNA repair pathway, in a mouse HD model produces somatic CAG expansions (Long et al. (2018) J. Hum Genet., 103: 1-9). MSH3, another component of the mismatch repair pathway, has been reported to be linked to somatic expansion: polymorphisms in Msh3 was associated with somatic instability of the expanded CTG trinucleotide repeat in myotonic dystrophy type 1 (DM1) patients (Morales et al., (2016) DNA Repair 40: 57-66). Furthermore, natural polymorphisms in Msh3 and Mlh1 have been revealed as mediators of mouse strain specific differences in CTG·CAG repeat instability (Pinto et al. (2013) ibid; Tome et al., (2013) PLoS Genet. 9 e1003280). Further evidence of Msh2 and Msh3's involvement in expansion repeats was reported in a study in which short hairpin RNA (shRNA) knockdown of either MSH2 or MSH3 slowed, and ectopic expression of either MSH2 or MSH3 induced GAA trinucleotide repeat expansion of the Friedreich Ataxia (FRDA) gene in fibroblasts derived from FRDA patients (Halabi et al., (2012) J. Biol. Chem. 287, 29958-29967). In spite of some inconsistent results provided above, there is strong evidence that the MMR pathway plays some role in the expansion of trinucleotide repeats in various disorders. Moreover, they are the first to recognize that the inhibition of the MMR pathway provides for the treatment or prevention of these repeat expansion disorders; however, no therapy is currently available or in development which modulates MMR for purposes of treating or preventing these repeat expansion disorders.

### III. Oligonucleotide Agents

[0124] Agents described herein that reduce the level and/or activity of MSH3 in a cell can be, for example, a polynucleotide, e.g., an oligonucleotide, or pharmaceutically acceptable salt thereof. These agents reduce the level of an activity related to MSH3, or a related downstream effect, or reduce the level of MSH3 in a cell or subject.

[0125] In some aspects, the agent that reduces the level and/or activity of MSH3 is a polynucleotide. In some aspects, the polynucleotide is a single-stranded oligonucleotide, e.g., that acts by way of an RNase H-mediated pathway. Oligonucleotides include DNA and DNA/RNA chimeric molecules, typically about 10 to 30 nucleotides in length, which recognize polynucleotide target sequences or sequence portions through hydrogen bonding interactions with the nucleotide bases of the target sequence (e.g., MSH3). An oligonucleotide molecule can decrease the expression level (e.g., protein level or mRNA level) of MSH3. For example, an oligonucleotide includes oligonucleotides that targets full-length MSH3. In some aspects, the oligonucleotide molecule recruits an RNase H enzyme, leading to target mRNA degradation.

[0126] In some aspects, the oligonucleotide, or pharmaceutically acceptable salt thereof, decreases the level and/or activity of a positive regulator of function. In other aspects, the oligonucleotide, or pharmaceutically acceptable salt thereof, increases the level and/or activity of an inhibitor of a positive regulator of function. In some aspects, the oligonucleotide, or pharmaceutically acceptable salt thereof, increases the level and/or activity of a negative regulator of function.

[0127] In some aspects, the oligonucleotide, or pharmaceutically acceptable salt thereof, decreases the level and/or activity or function of MSH3. In some aspects, the oligonucleotide, or pharmaceutically acceptable salt thereof, inhibits expression of MSH3. In other aspects, the oligonucleotide, or pharmaceutically acceptable salt thereof, increases degradation of MSH3 and/or decreases the stability (i.e., half-life) of MSH3. The oligonucleotide, or pharmaceutically acceptable salt thereof, can be chemically synthesized.

[0128] An oligonucleotide, or pharmaceutically acceptable salt thereof, can be synthesized by standard methods known in the art as further discussed below, e.g., by use of an automated DNA synthesizer, such as are commercially available from, for example, Biosearch, Applied Biosystems, Inc.

[0129] The oligonucleotide, or pharmaceutically acceptable salt thereof, compound can be prepared using solution-phase or solid-phase organic synthesis or both. Organic synthesis offers the advantage that the oligonucleotide, or pharmaceutically acceptable salt thereof, comprising unnatural or alternative nucleotides can be easily prepared. A single-stranded oligonucleotide, or pharmaceutically acceptable salt thereof, can be prepared using solution-phase or solid-phase organic synthesis or both.

[0130] Some aspects of the disclosure are related to single-stranded oligonucleotides of 15-30 linked nucleotides in length, wherein the oligonucleotide, or a portion thereof, is at least 95% complementary to at least 15 contiguous nucleobases at positions 876-901 of SEQ ID NO: 5151, or a pharmaceutically acceptable salt thereof. In some aspects, the oligonucleotide, or a portion thereof, is at least 98% complementary to at least 15 contiguous nucleobases at positions 876-901 of SEQ ID NO: 5151, or a pharmaceutically acceptable salt thereof. In some aspects, the oligonucleotide, or a portion thereof, is at least 99% complementary to at least 15 contiguous nucleobases at positions 876-901 of SEQ ID NO: 5151, or a pharmaceutically acceptable salt thereof. In some aspects, the oligonucleotide, or a portion thereof, is 100% complementary to at least 15 contiguous nucleobases at positions 876-901 of SEQ ID NO: 5151, or a pharmaceutically acceptable salt thereof. In some aspects, the oligonucleotide, or a portion thereof, is complementary to 17-23 contiguous nucleobases at positions 876-901 of SEQ ID NO: 5151, or a pharmaceutically acceptable salt thereof. In some aspects, the oligonucleotide, or a portion thereof, is complementary to 17-20 contiguous nucleobases at positions 876-901 of SEQ ID NO: 5151, or a pharmaceutically acceptable salt thereof. In some aspects, the 17-20 contiguous nucleobases begin at position 876, 877, 878, 879, 880, 881, 882, 883, 884, or 885 of SEQ ID NO: 5151, or a pharmaceutically acceptable salt thereof. In some aspects, the oligonucleotide is 17-20 linked nucleotides in length, or a pharmaceutically acceptable salt thereof. In some aspects, the oligonucleotide, or a portion thereof, is complementary to 20-23 contiguous nucleobases at positions 876-901 of SEQ ID NO: 5151, or a pharmaceutically acceptable salt thereof. In some aspects, the 20-23 contiguous nucleobases begin at position 876, 877, 878, 879, 880, 881, or 882 of SEQ ID NO: 5151, or a pharmaceutically acceptable salt thereof. In some aspects, the oligonucleotide is 20-23 linked nucleotides in length, or a pharmaceutically acceptable salt thereof.

[0131] Some aspects of the disclosure relate to single-stranded oligonucleotides of 15-30 linked nucleotides in length, wherein the oligonucleotide, or a portion thereof, is at least 95% complementary to at least 15 contiguous nucleobases at positions 931-956 of SEQ ID NO: 5151, or a pharmaceutically acceptable salt thereof. In some aspects, the oligonucleotide, or a portion thereof, is at least 98% complementary to at least 15 contiguous nucleobases at positions 931-956 of SEQ ID NO: 5151, or a pharmaceutically acceptable salt thereof. In some aspects, the oligonucleotide, or a portion thereof, is at least 99% complementary to at least 15 contiguous nucleobases at positions 931-956 of SEQ ID NO: 5151, or a pharmaceutically acceptable salt thereof. In some aspects, the oligonucleotide, or a portion thereof, is 100% complementary to at least 15 contiguous nucleobases at positions 931-956 of SEQ ID NO: 5151, or a pharmaceutically acceptable salt thereof. In some aspects, the oligonucleotide, or a portion thereof, is complementary to 17-23 contiguous nucleobases at positions 931-956 of SEQ ID NO: 5151, or a pharmaceutically acceptable salt thereof. In some aspects, the oligonucleotide, or a portion thereof, is complementary to 17-20 contiguous nucleobases at positions 931-956 of SEQ ID NO: 5151, or a pharmaceutically acceptable salt thereof. In some aspects, the oligonucleotide, or a portion thereof, is complementary to 17-20 contiguous nucleobases beginning at position 931, 932, 933, 934, 935, 936, 937, 938, 939, or 940 of SEQ ID NO: 5151, or a pharmaceutically acceptable salt thereof. In some aspects, the oligonucleotide is 17-20 linked nucleotides in length, or a pharmaceutically acceptable salt thereof. In some aspects, the oligonucleotide, or a portion thereof, is complementary to 20-23 contiguous nucleobases at positions 931-956 of SEQ ID NO: 5151, or a pharmaceutically acceptable salt thereof. In some aspects, the oligonucleotide, or a portion thereof, is complementary to 20-23 contiguous nucleobases beginning at position 931, 932, 933, 934, 935, 936, 937 of SEQ ID NO: 5151, or a pharmaceutically acceptable salt thereof. In some aspects, the oligonucleotide is 20-23 linked nucleotides in length, or a pharmaceutically acceptable salt thereof.

[0132] Some aspects of the disclosure are related to single-stranded oligonucleotides of 15-30 linked nucleotides in length, wherein the oligonucleotide, or a portion thereof, is at least 95% complementary to at least 15 contiguous nucleobases at positions 1310-1337 of SEQ ID NO: 5151, or a pharmaceutically acceptable salt thereof. In some aspects, the oligonucleotide, or a portion thereof, is at least 98% complementary to at least 15 contiguous nucleobases at positions 1310-1337 of SEQ ID NO: 5151, or a pharmaceutically acceptable salt thereof. In some aspects, the oligonucleotide, or a portion thereof, is at least 99% complementary to at least 15 contiguous nucleobases at positions 1310-1337 of SEQ ID NO: 5151, or a pharmaceutically acceptable salt thereof. In some aspects, the oligonucleotide, or a portion thereof, is 100% complementary to at least 15 contiguous nucleobases at positions 1310-1337 of SEQ ID NO: 5151, or a pharmaceutically acceptable salt thereof. In some aspects, the oligonucleotide, or a portion thereof, is complementary to 17-23 contiguous nucleobases at positions 1310-1337 of SEQ ID NO: 5151, or a pharmaceutically acceptable salt thereof. In some aspects, the oligonucleotide, or a portion thereof, is complementary to 17-20 contiguous nucleobases at positions 1310-1337 of SEQ ID NO: 5151, or a pharmaceutically acceptable salt thereof. In some aspects, the oligonucleotide, or a portion thereof, is complementary to 17-20 contiguous nucleobases beginning at position 1310, 1311, 1312, 1313, 1314, 1315, 1316, 1317, 1318, 1319, 1320, or 1321 of SEQ ID NO: 5151, or a pharmaceutically acceptable salt thereof. In some aspects, the oligonucleotide is 17-20 linked nucleotides in length, or a pharmaceutically acceptable salt thereof. In some aspects, the oligonucleotide, or a portion thereof, is complementary to 20-23 contiguous nucleobases at positions 1310-1337 of SEQ ID NO: 5151, or a pharmaceutically acceptable salt thereof. In some aspects, the oligonucleotide, or a portion thereof, is complementary to 20-23 contiguous nucleobases beginning at position 1310, 1311, 1312, 1313, 1314, 1315, 1316, 1317, or 1318 of SEQ ID NO: 5151, or a pharmaceutically acceptable salt thereof. In some aspects, the oligonucleotide is 20-23 linked nucleotides in length, or a pharmaceutically acceptable salt thereof.

[0133] Some aspects of the disclosure related to single-stranded oligonucleotides of 15-30 linked nucleotides in length, wherein the oligonucleotide, or a portion thereof, is at least 95% complementary to at least 15 contiguous nucleobases at positions 2141-2169 of SEQ ID NO: 5151, or a pharmaceutically acceptable salt thereof. In some aspects, the oligonucleotide, or a portion thereof, is at least 98% complementary to at least 15 contiguous nucleobases at positions 2141-2169 of SEQ ID NO: 5151, or a pharmaceutically acceptable salt thereof. In some aspects, the oligonucleotide, or a portion thereof, is at least 99% complementary to at least 15 contiguous nucleobases at positions 2141-2169 of SEQ ID NO: 5151, or a pharmaceutically acceptable salt thereof. In some aspects, the oligonucleotide, or a portion thereof, is 100% complementary to at least 15 contiguous nucleobases at positions 2141-2169 of SEQ ID NO: 5151, or a pharmaceutically acceptable salt thereof. In some aspects, the oligonucleotide, or a portion thereof, is complementary to 17-23 contiguous nucleobases at positions 2141-2169 of SEQ ID NO: 5151, or a pharmaceutically acceptable salt thereof. In some aspects, the oligonucleotide, or a portion thereof, is complementary to 17-20 contiguous nucleobases at positions 2141-2169 of SEQ ID NO: 5151, or a pharmaceutically acceptable salt thereof. In some aspects, the oligonucleotide, or a portion thereof, is complementary to 17-20 contiguous nucleobases beginning at position 2141, 2142, 2143, 2144, 2145, 2146, 2147, 2148, 2149, 2150, 2151, 2152, or 2153 of SEQ ID NO: 5151, or a pharmaceutically acceptable salt thereof. In some aspects, the oligonucleotide is 17-20 linked nucleotides in length, or a pharmaceutically acceptable salt thereof. In some aspects, the oligonucleotide, or a portion thereof, is complementary to 20-23 contiguous nucleobases at positions 2141-2169 of SEQ ID NO: 5151, or a pharmaceutically acceptable salt thereof. In some aspects, the oligonucleotide, or a portion thereof, is complementary to 20-23 contiguous nucleobases beginning at position 2141, 2142, 2143, 2144, 2145, 2146, 2147, 2148, 2149, or 2150 of SEQ ID NO: 5151, or a pharmaceutically acceptable salt thereof. In some aspects, the oligonucleotide is 20-23 linked nucleotides in length, or a pharmaceutically acceptable salt thereof.

[0134] Some aspects of the disclosure relate to single-stranded oligonucleotides of 15-30 linked nucleotides in length, wherein the oligonucleotide, or a portion thereof, is at least 95% complementary to at least 15 contiguous nucleobases at positions 2267-2292 of SEQ ID NO: 5151, or a pharmaceutically acceptable salt thereof. In some aspects, the oligonucleotide, or a portion thereof, is at least 98% complementary to at least 15 contiguous nucleobases at positions 2267-2292 of SEQ ID NO: 5151, or a pharmaceutically acceptable salt thereof. In some aspects, the oligonucleotide, or a portion thereof, is at least 99% complementary to at least 15 contiguous nucleobases at positions 2267-2292 of SEQ ID NO: 5151, or a pharmaceutically acceptable salt thereof. In some aspects, the oligonucleotide, or a portion thereof, is 100% complementary to at least 15 contiguous nucleobases at positions 2267-2292 of SEQ ID NO: 5151, or a pharmaceutically acceptable salt thereof. In some aspects, the oligonucleotide, or a portion thereof, is complementary to 17-23 contiguous nucleobases at positions 2267-2292 of SEQ ID NO: 5151, or a pharmaceutically acceptable salt thereof. In some aspects, the oligonucleotide, or a portion thereof, is complementary to 17-20 contiguous nucleobases at positions 2267-2292 of SEQ ID NO: 5151, or a pharmaceutically acceptable salt thereof. In some aspects, the oligonucleotide, or a portion thereof, is complementary to 17-20 contiguous nucleobases beginning at position 2267, 2268, 2269, 2270, 2271, 2272, 2273, 2274, 2275, or 2276 of SEQ ID NO: 5151, or a pharmaceutically acceptable salt thereof. In some aspects, the oligonucleotide is 17-20 linked nucleotides in length, or a pharmaceutically acceptable salt thereof. In some aspects, the oligonucleotide, or a portion thereof, is complementary to 20-23 contiguous nucleobases at positions 2267-2292 of SEQ ID NO: 5151, or a pharmaceutically acceptable salt thereof. In some aspects, the oligonucleotide, or a portion thereof, is complementary to 20-23 contiguous nucleobases beginning at position 2267, 2268, 2269, 2270, 2271, 2272, or 2273 of SEQ ID NO: 5151, or a pharmaceutically acceptable salt thereof. In some aspects, the oligonucleotide is 20-23 linked nucleotides in length, or a pharmaceutically acceptable salt thereof.

[0135] Some aspects of the disclosure relate to single-stranded oligonucleotides of 15-30 linked nucleotides in length, wherein the oligonucleotide is at least 95% complementary to at least 15 contiguous nucleobases at positions 2543-2579 of SEQ ID NO: 5151, or a pharmaceutically acceptable salt thereof. In some aspects, the oligonucleotide, or a portion thereof, is at least 98% complementary to at least 15 contiguous nucleobases at positions 2543-2579 of SEQ ID NO: 5151, or a pharmaceutically acceptable salt thereof. In some aspects, the oligonucleotide, or a portion thereof, is at least 99% complementary to at least 15 contiguous nucleobases at positions 2543-2579 of SEQ ID NO: 5151, or a pharmaceutically acceptable salt thereof. In some aspects, the oligonucleotide, or a portion thereof, is 100% complementary to at least 15 contiguous nucleobases at positions 2543-2579 of SEQ ID NO: 5151, or a pharmaceutically acceptable salt thereof. In some aspects, the oligonucleotide, or a portion thereof, is complementary to 17-23 contiguous nucleobases at positions 2543-2579 of SEQ ID NO: 5151, or a pharmaceutically acceptable salt thereof. In some aspects, the oligonucleotide, or a portion thereof, is complementary to 17-20 contiguous nucleobases at positions 2543-2579 of SEQ ID NO: 5151, or a pharmaceutically acceptable salt thereof. In some aspects, the oligonucleotide, or a portion thereof, is complementary to 17-20 contiguous nucleobases beginning at position 2543, 2544, 2545, 2546, 2547, 2548, 2549, 2550, 2551, 2552, 2553, 2554, 2555, 2556, 2557, 2558, 2559, 2560, 2561, 2562, or 2563 of SEQ ID NO: 5151, or a pharmaceutically acceptable salt thereof. In some aspects, the oligonucleotide is 17-20 linked nucleotides in length, or a pharmaceutically acceptable salt thereof. In some aspects, the oligonucleotide, or a portion thereof, is complementary to 20-23 contiguous nucleobases at positions 2543-2579 of SEQ ID NO: 5151, or a pharmaceutically acceptable salt thereof. In some aspects, the oligonucleotide is complementary to 20-23 contiguous nucleobases beginning at position 2543, 2544, 2545, 2546, 2547, 2548, 2549, 2550, 2551, 2552, 2553, 2554, 2555, 2556, 2557, 2558, 2559, or 2560 of SEQ ID NO: 5151, or a pharmaceutically acceptable salt thereof. In some aspects, the oligonucleotide is 20-23 linked nucleotides in length, or a pharmaceutically acceptable salt thereof.

[0136] Some aspects of the disclosure relate to single-stranded oligonucleotides of 15-30 linked nucleotides in length, wherein the oligonucleotide, or a portion thereof, is at least 95% complementary to at least 15 contiguous nucleobases at positions 2141-2169 of SEQ ID NO: 5151, or a pharmaceutically acceptable salt thereof. In some aspects, the oligonucleotide, or a portion thereof, is at least 98% complementary to at least 15 contiguous nucleobases at positions 2141-2169 of SEQ ID NO: 5151, or a pharmaceutically acceptable salt thereof. In some aspects, the oligonucleotide, or a portion thereof, is at least 99% complementary to at least 15 contiguous nucleobases at positions 2141-2169 of SEQ ID NO: 5151, or a pharmaceutically acceptable salt thereof. In some aspects, the oligonucleotide, or a portion thereof, is 100% complementary to at least 15 contiguous nucleobases at positions 2141-2169 of SEQ ID NO: 5151, or a pharmaceutically acceptable salt thereof. In some aspects, the oligonucleotide, or a portion thereof, is complementary to 17-23 contiguous nucleobases at positions 2141-2169 of SEQ ID NO: 5151, or a pharmaceutically acceptable salt thereof. In some aspects, the oligonucleotide, or a portion thereof, is complementary to 17-20 contiguous nucleobases at positions 2141-2169 of SEQ ID NO: 5151, or a pharmaceutically acceptable salt thereof. In some aspects, the oligonucleotide, or a portion thereof, is complementary to 17-20 contiguous nucleobases beginning at position 2141, 2142, 2143, 2144, 2145, 2146, 2147, 2148, 2149, 2150, 2151, 2152, or 2153 of SEQ ID NO: 5151, or a pharmaceutically acceptable salt thereof. In some aspects, wherein the oligonucleotide is 17-20 linked nucleotides in length, or a pharmaceutically acceptable salt thereof. In some aspects, the oligonucleotide, or a portion thereof, is complementary to 20-23 contiguous nucleobases at positions 2141-2169 of SEQ ID NO: 5151, or a pharmaceutically acceptable salt thereof. In some aspects, the oligonucleotide, or a portion thereof, is complementary to 20-23 contiguous nucleobases beginning at position 2141, 2142, 2143, 2144, 2145, 2146, 2147, 2148, or 2149 of SEQ ID NO: 5151, or a pharmaceutically acceptable salt thereof. In some aspects, the oligonucleotide is 20-23 linked nucleotides in length, or a pharmaceutically acceptable salt thereof.

[0137] Some aspects of the disclosure relate to single-stranded oligonucleotides of 15-30 linked nucleotides in length, wherein the oligonucleotide, or a portion thereof, is at least 95% complementary to at least 15 contiguous nucleobases at positions 2267-2292 of SEQ ID NO: 5151, or a pharmaceutically acceptable salt thereof. In some aspects, the oligonucleotide, or a portion thereof, is at least 98% complementary to at least 15 contiguous nucleobases at positions 2267-2292 of SEQ ID NO: 5151, or a pharmaceutically acceptable salt thereof. In some aspects, the oligonucleotide, or a portion thereof, is at least 99% complementary to at least 15 contiguous nucleobases at positions 2267-2292 of SEQ ID NO: 5151, or a pharmaceutically acceptable salt thereof. In some aspects, the oligonucleotide, or a portion thereof, is 100% complementary to at least 15 contiguous nucleobases at positions 2267-2292 of SEQ ID NO: 5151, or a pharmaceutically acceptable salt thereof. In some aspects, the oligonucleotide, or a portion thereof, is complementary to 17-23 contiguous nucleobases at positions 2267-2292 of SEQ ID NO: 5151, or a pharmaceutically acceptable salt thereof. In some aspects, the oligonucleotide, or a portion thereof, is complementary to 17-20 contiguous nucleobases at positions 2267-2292 of SEQ ID NO: 5151, or a pharmaceutically acceptable salt thereof. In some aspects, the oligonucleotide, or a portion thereof, is complementary to 17-20 contiguous nucleobases beginning at position 2267, 2268, 2269, 2270, 2271, 2272, 2273, 2274, 2275, or 2276 of SEQ ID NO: 5151, or a pharmaceutically acceptable salt thereof. In some aspects, the oligonucleotide is 17-20 linked nucleotides in length, or a pharmaceutically acceptable salt thereof. In some aspects, the oligonucleotide, or a portion thereof, is complementary to 20-23 contiguous nucleobases at positions 2267-2292 of SEQ ID NO: 5151, or a pharmaceutically acceptable salt thereof. In some aspects, the oligonucleotide, or a portion thereof, is complementary to 20-23 contiguous nucleobases beginning at position 2267, 2268, 2269, 2270, 2271, or 2272 of SEQ ID NO: 5151, or a pharmaceutically acceptable salt thereof. In some aspects, the oligonucleotide is 20-23 linked nucleotides in length, or a pharmaceutically acceptable salt thereof.

[0138] Some aspects of the disclosure relate to single-stranded oligonucleotides of 15-30 linked nucleotides in length, wherein the oligonucleotide, or a portion thereof, is at least 95% complementary to at least 15 contiguous nucleobases at positions 2620-2647 of SEQ ID NO: 5151, or a pharmaceutically acceptable salt thereof. In some aspects, the oligonucleotide, or a portion thereof, is at least 98% complementary to at least 15 contiguous nucleobases at positions 2620-2647 of SEQ ID NO: 5151, or a pharmaceutically acceptable salt thereof. In some aspects, the oligonucleotide, or a portion thereof, is at least 99% complementary to at least 15 contiguous nucleobases at positions 2620-2647 of SEQ ID NO: 5151, or a pharmaceutically acceptable salt thereof. In some aspects, the oligonucleotide, or a portion thereof, is 100% complementary to at least 15 contiguous nucleobases at positions 2620-2647 of SEQ ID NO: 5151, or a pharmaceutically acceptable salt thereof. In some aspects, the oligonucleotide, or a portion thereof, is complementary to 17-23 contiguous nucleobases at positions 2620-2647 of SEQ ID NO: 5151, or a pharmaceutically acceptable salt thereof. In some aspects, the oligonucleotide, or a portion thereof, is complementary to 17-20 contiguous nucleobases at positions 2620-2647 of SEQ ID NO: 5151, or a pharmaceutically acceptable salt thereof. In some aspects, the oligonucleotide, or a portion thereof, is complementary to 17-20 contiguous nucleobases beginning at position 2620, 2621, 2622, 2623, 2624, 2625, 2626, 2627, 2628, 2629, 2630, or 2631 of SEQ ID NO: 5151, or a pharmaceutically acceptable salt thereof. In some aspects, the oligonucleotide is 17-20 linked nucleotides in length, or a pharmaceutically acceptable salt thereof. In some aspects, the oligonucleotide, or a portion thereof, is complementary to 20-23 contiguous nucleobases at positions 2620-2647 of SEQ ID NO: 5151, or a pharmaceutically acceptable salt thereof. In some aspects, the oligonucleotide, or a portion thereof, is complementary to 20-23 contiguous nucleobases beginning at position 2620, 2621, 2622, 2623, 2624, 2625, 2626, 2627, or 2627 of SEQ ID NO: 5151, or a pharmaceutically acceptable salt thereof. In some aspects, the oligonucleotide is 20-23 linked nucleotides in length, or a pharmaceutically acceptable salt thereof.

[0139] Some aspects of the disclosure are related to single-stranded oligonucleotides of 15-30 linked nucleotides in length, wherein the oligonucleotide, or a portion thereof, is at least 95% complementary to at least 15 contiguous nucleobases at positions 2685-2710 of SEQ ID NO: 5151, or a pharmaceutically acceptable salt thereof. In some aspects, the oligonucleotide, or a portion thereof, is at least 98% complementary to at least 15 contiguous nucleobases at positions 2685-2710 of SEQ ID NO: 5151, or a pharmaceutically acceptable salt thereof. In some aspects, the oligonucleotide, or a portion thereof, is at least 99% complementary to at least 15 contiguous nucleobases at positions 2685-2710 of SEQ ID NO: 5151, or a pharmaceutically acceptable salt thereof. In some aspects, the oligonucleotide, or a portion thereof, is 100% complementary to at least 15 contiguous nucleobases at positions 2685-2710 of SEQ ID NO: 5151, or a pharmaceutically acceptable salt thereof. In some aspects, the oligonucleotide, or a portion thereof, is complementary to 17-23 contiguous nucleobases at positions 2685-2710 of SEQ ID NO: 5151, or a pharmaceutically acceptable salt thereof. In some aspects, the oligonucleotide, or a portion thereof, is complementary to 17-20 contiguous nucleobases at positions 2685-2710 of SEQ ID NO: 5151, or a pharmaceutically acceptable salt thereof. In some aspects, the oligonucleotide, or a portion thereof, is complementary to 17-20 contiguous nucleobases beginning at position 2685, 2686, 2687, 2688, 2689, 2690, 2691, 2692, 2693, or 2694 of SEQ ID NO: 5151, or a pharmaceutically acceptable salt thereof. In some aspects, the oligonucleotide is 17-20 linked nucleotides in length, or a pharmaceutically acceptable salt thereof. In some aspects, the oligonucleotide is complementary to 20-23 contiguous nucleobases at positions 2685-2710 of SEQ ID NO: 5151, or a pharmaceutically acceptable salt thereof. In some aspects, the oligonucleotide is complementary to 20-23 contiguous nucleobases beginning at position 2685, 2686, 2687, 2688, 2689, 2690, or 2691 of SEQ ID NO: 5151, or a pharmaceutically acceptable salt thereof. In some aspects, the oligonucleotide is 20-23 linked nucleotides in length, or a pharmaceutically acceptable salt thereof.

[0140] Some aspects of the disclosure relate to single-stranded oligonucleotides of 15-30 linked nucleotides in length, wherein the oligonucleotide, or a portion thereof, is at least 95% complementary to at least 15 contiguous nucleobases at positions 2769-2795 of SEQ ID NO: 5151, or a pharmaceutically acceptable salt thereof. In some aspects, the oligonucleotide, or a portion thereof, is at least 98% complementary to at least 15 contiguous nucleobases at positions 2769-2795 of SEQ ID NO: 5151, or a pharmaceutically acceptable salt thereof. In some aspects, the oligonucleotide, or a portion thereof, is at least 99% complementary to at least 15 contiguous nucleobases at positions 2769-2795 of SEQ ID NO: 5151, or a pharmaceutically acceptable salt thereof. In some aspects, the oligonucleotide, or a portion thereof, is 100% complementary to at least 15 contiguous nucleobases at positions 2769-2795 of SEQ ID NO: 5151, or a pharmaceutically acceptable salt thereof. In some aspects, the oligonucleotide, or a portion thereof, is complementary to 17-23 contiguous nucleobases at positions 2769-2795 of SEQ ID NO: 5151, or a pharmaceutically acceptable salt thereof. In some aspects, the oligonucleotide, or a portion thereof, is complementary to 17-20 contiguous nucleobases at positions 2769-2795 of SEQ ID NO: 5151, or a pharmaceutically acceptable salt thereof. In some aspects, the oligonucleotide is complementary to 17-20 contiguous nucleobases beginning at position 2769, 2770, 2771, 2772, 2773, 2774, 2775, 2776, 2777, 2778, or 2779 of SEQ ID NO: 5151, or a pharmaceutically acceptable salt thereof. In some aspects, the oligonucleotide is 17-20 linked nucleotides in length, or a pharmaceutically acceptable salt thereof. In some aspects, the oligonucleotide, or a portion thereof, is complementary to 20-23 contiguous nucleobases at positions 2769-2795 of SEQ ID NO: 5151, or a pharmaceutically acceptable salt thereof. In some aspects, the oligonucleotide, or a portion thereof, is complementary to 20-23 contiguous nucleobases beginning at position 2769, 2770, 2771, 2772, 2773, 2774, 2775, or 2776 of SEQ ID NO: 5151, or a pharmaceutically acceptable salt thereof. In some aspects, the oligonucleotide is 20-23 linked nucleotides in length, or a pharmaceutically acceptable salt thereof.

[0141] Some aspects of the disclosure relate to single-stranded oligonucleotides of 15-30 linked nucleotides in length, wherein the oligonucleotide, or a portion thereof, is at least 95% complementary to at least 15 contiguous nucleobases at positions 2798-2868 of SEQ ID NO: 5151, or a pharmaceutically acceptable salt thereof. In some aspects, the oligonucleotide, or a portion thereof, is at least 98% complementary to at least 15 contiguous nucleobases at positions 2798-2868 of SEQ ID NO: 5151, or a pharmaceutically acceptable salt thereof. In some aspects, the oligonucleotide, or a portion thereof, is at least 99% complementary to at least 15 contiguous nucleobases at positions 2798-2868 of SEQ ID NO: 5151, or a pharmaceutically acceptable salt thereof. In some aspects, the oligonucleotide, or a portion thereof, is 100% complementary to at least 15 contiguous nucleobases at positions 2798-2868 of SEQ ID NO: 5151, or a pharmaceutically acceptable salt thereof. In some aspects, the oligonucleotide, or a portion thereof, is complementary to 17-23 contiguous nucleobases at positions 2798-2868 of SEQ ID NO: 5151, or a pharmaceutically acceptable salt thereof. In some aspects, the oligonucleotide, or a portion thereof, is complementary to 17-20 contiguous nucleobases at positions 2798-2868 of SEQ ID NO: 5151, or a pharmaceutically acceptable salt thereof. In some aspects, the oligonucleotide, or a portion thereof, is complementary to 17-20 contiguous nucleobases beginning at position 2798, 2799, 2800, 2801, 2802, 2803, 2804, 2805, 2806, 2807, 2808, 2809, 2810, 2811, 2812, 2813, 2814, 2815, 2816, 2817, 2818, 2819, 2820, 2821, 2822, 2823, 2824, 2825, 2826, 2827, 2828, 2829, 2830, 2831, 2832, 2833, 2834, 2835, 2836, 2837, 2838, 2839, 2840, 2841, 2842, 2843, 2844, 2845, 2846, 2847, 2848, 2849, 2850, 2851, or 2852 of SEQ ID NO: 5151, or a pharmaceutically acceptable salt thereof. In some aspects, the oligonucleotide is 17-20 linked nucleotides in length, or a pharmaceutically acceptable salt thereof. In some aspects, the oligonucleotide, or a portion thereof, is complementary to 20-23 contiguous nucleobases at positions 2798-2868 of SEQ ID NO: 5151, or a pharmaceutically acceptable salt thereof. In some aspects, the oligonucleotide, or a portion thereof, is complementary to 20-23 contiguous nucleobases beginning at position 2798, 2799, 2800, 2801, 2802, 2803, 2804, 2805, 2806, 2807, 2808, 2809, 2810, 2811, 2812, 2813, 2814, 2815, 2816, 2817, 2818, 2819, 2820, 2821, 2822, 2823, 2824, 2825, 2826, 2827, 2828, 2829, 2830, 2831, 2832, 2833, 2834, 2835, 2836, 2837, 2838, 2839, 2840, 2841, 2842, 2843, 2844, 2845, 2846, 2847, 2848, or 2849 of SEQ ID NO: 5151, or a pharmaceutically acceptable salt thereof. In some aspects, the oligonucleotide is 20-23 linked nucleotides in length, or a pharmaceutically acceptable salt thereof.

[0142] Some aspects of the disclosure relate to single-stranded oligonucleotides of 15-30 linked nucleotides in length, wherein the oligonucleotide, or a portion thereof, is at least 95% complementary to at least 15 contiguous nucleobases at positions 2950-2975 of SEQ ID NO: 5151, or a pharmaceutically acceptable salt thereof. In some aspects, the oligonucleotide, or a portion thereof, is at least 98% complementary to at least 15 contiguous nucleobases at positions 2950-2975 of SEQ ID NO: 5151, or a pharmaceutically acceptable salt thereof. In some aspects, the oligonucleotide, or a portion thereof, is at least 99% complementary to at least 15 contiguous nucleobases at positions 2950-2975 of SEQ ID NO: 5151, or a pharmaceutically acceptable salt thereof. In some aspects, the oligonucleotide, or a portion thereof, is 100% complementary to at least 15 contiguous nucleobases at positions 2950-2975 of SEQ ID NO: 5151, or a pharmaceutically acceptable salt thereof. In some aspects, the oligonucleotide, or a portion thereof, is complementary to 17-23 contiguous nucleobases at positions 2950-2975 of SEQ ID NO: 5151, or a pharmaceutically acceptable salt thereof. In some aspects, the oligonucleotide, or a portion thereof, is complementary to 17-20 contiguous nucleobases at positions 2950-2975 of SEQ ID NO: 5151, or a pharmaceutically acceptable salt thereof. In some aspects, the oligonucleotide, or a portion thereof, is complementary to 17-20 contiguous nucleobases beginning at position 2950, 2951, 2952, 2953, 2954, 2955, 2956, 2957, 2958, or 2959 of SEQ ID NO: 5151, or a pharmaceutically acceptable salt thereof. In some aspects, the oligonucleotide is 17-20 linked nucleotides in length, or a pharmaceutically acceptable salt thereof. In some aspects, the oligonucleotide, or a portion thereof, is complementary to 20-23 contiguous nucleobases at positions 2950-2975 of SEQ ID NO: 5151, or a pharmaceutically acceptable salt thereof. In some aspects, the oligonucleotide, or a portion thereof, is complementary to 20-23 contiguous nucleobases beginning at position 2950, 2951, 2952, 2953, 2954, 2955, or 2956 of SEQ ID NO: 5151, or a pharmaceutically acceptable salt thereof. In some aspects, the oligonucleotide is 20-23 linked nucleotides in length, or a pharmaceutically acceptable salt thereof.

[0143] In some aspects, the oligonucleotide is not any one of Antisense Oligo Nos. 5152-5176 of Table 3.

[0144] In some aspects, the oligonucleotide consists of a nucleobase sequence selected from the group consisting of any of SEQ ID NOs: 1-5150 and 5152-5176, or a pharmaceutically acceptable salt thereof. In some aspects, the oligonucleotide consists of a nucleobase sequence selected from the group consisting of any of SEQ ID NOs: 1-5150, or a pharmaceutically acceptable salt thereof. In some aspects, the oligonucleotide consists of a nucleobase sequence selected from the group consisting of any of SEQ ID NOs: 1-206 and 5152, or a pharmaceutically acceptable salt thereof. In some aspects, the oligonucleotide consists of a nucleobase sequence selected from the group consisting of any of SEQ ID NOs: 1-206, or a pharmaceutically acceptable salt thereof. In some aspects, the oligonucleotide consists of a nucleobase sequence selected from the group consisting of any of SEQ ID NOs: 207-412 and 5153, or a pharmaceutically acceptable salt thereof. In some aspects, the oligonucleotide consists of a nucleobase sequence selected from the group consisting of any of SEQ ID NOs: 207-412, or a pharmaceutically acceptable salt thereof. In some aspects, the oligonucleotide consists of a nucleobase sequence selected from the group consisting of any of SEQ ID NOs: 413-618 and 5154, or a pharmaceutically acceptable salt thereof. In some aspects, the oligonucleotide consists of a nucleobase sequence selected from the group consisting of any of SEQ ID NOs: 413-618, or a pharmaceutically acceptable salt thereof. In some aspects, the oligonucleotide consists of a nucleobase sequence selected from the group consisting of any of SEQ ID NOs: 619-824 and 5155, or a pharmaceutically acceptable salt thereof. In some aspects, the oligonucleotide consists of a nucleobase sequence selected from the group consisting of any of SEQ ID NOs: 619-824, or a pharmaceutically acceptable salt thereof. In some aspects, the oligonucleotide consists of a nucleobase sequence selected from the group consisting of any of SEQ ID NOs: 825-1030 and 5156, or a pharmaceutically acceptable salt thereof. In some aspects, the oligonucleotide consists of a nucleobase sequence selected from the group consisting of any of SEQ ID NOs: 825-1030, or a pharmaceutically acceptable salt thereof. In some aspects, the oligonucleotide consists of a nucleobase sequence selected from the group consisting of any of SEQ ID NOs: 1031-1236 and 5157, or a pharmaceutically acceptable salt thereof. In some aspects, the oligonucleotide consists of a nucleobase sequence selected from the group consisting of any of SEQ ID NOs: 1031-1236, or a pharmaceutically acceptable salt thereof. In some aspects, the oligonucleotide consists of a nucleobase sequence selected from the group consisting of any of SEQ ID NOs: 1237-1442 and 5158, or a pharmaceutically acceptable salt thereof. In some aspects, the oligonucleotide consists of a nucleobase sequence selected from the group consisting of any of SEQ ID NOs: 1237-1442, or a pharmaceutically acceptable salt thereof. In some aspects, the oligonucleotide consists of a nucleobase sequence selected from the group consisting of any of SEQ ID NOs: 1443-1648 and 5159, or a pharmaceutically acceptable salt thereof. In some aspects, the oligonucleotide consists of a nucleobase sequence selected from the group consisting of any of SEQ ID NOs: 1443-1648, or a pharmaceutically acceptable salt thereof. In some aspects, the oligonucleotide consists of a nucleobase sequence selected from the group consisting of any of SEQ ID NOs: 1649-1854 and 5160, or a pharmaceutically acceptable salt thereof. In some aspects, the oligonucleotide consists of a nucleobase sequence selected from the group consisting of any of SEQ ID NOs: 1649-1854, or a pharmaceutically acceptable salt thereof. In some aspects, the oligonucleotide consists of a nucleobase sequence selected from the group consisting of any of SEQ ID NOs: 1855-2060 and 5161, or a pharmaceutically acceptable salt thereof. In some aspects, the oligonucleotide consists of a nucleobase sequence selected from the group consisting of any of SEQ ID NOs: 1855-2060, or a pharmaceutically acceptable salt thereof. In some aspects, the oligonucleotide consists of a nucleobase sequence selected from the group consisting of any of SEQ ID NOs: 2061-2266 and 5162, or a pharmaceutically acceptable salt thereof. In some aspects, the oligonucleotide consists of a nucleobase sequence selected from the group consisting of any of SEQ ID NOs: 2061-2266, or a pharmaceutically acceptable salt thereof. In some aspects, the oligonucleotide consists of a nucleobase sequence selected from the group consisting of any of SEQ ID NOs: 2267-2472 and 5163, or a pharmaceutically acceptable salt thereof. In some aspects, the oligonucleotide consists of a nucleobase sequence selected from the group consisting of any of SEQ ID NOs: 2267-2472, or a pharmaceutically acceptable salt thereof. In some aspects, the oligonucleotide consists of a nucleobase sequence selected from the group consisting of any of SEQ ID NOs: 2473-2678 and 5164, or a pharmaceutically acceptable salt thereof. In some aspects, the oligonucleotide consists of a nucleobase sequence selected from the group consisting of any of SEQ ID NOs: 2473-2678, or a pharmaceutically acceptable salt thereof. In some aspects, the oligonucleotide consists of a nucleobase sequence selected from the group consisting of any of SEQ ID NOs: 2679-2884 and 5165, or a pharmaceutically acceptable salt thereof. In some aspects, the oligonucleotide consists of a nucleobase sequence selected from the group consisting of any of SEQ ID NOs: 2679-2884, or a pharmaceutically acceptable salt thereof. In some aspects, the oligonucleotide consists of a nucleobase sequence selected from the group consisting of any of SEQ ID NOs: 2885-3090 and 5166, or a pharmaceutically acceptable salt thereof. In some aspects, the oligonucleotide consists of a nucleobase sequence selected from the group consisting of any of SEQ ID NOs: 2885-3090, or a pharmaceutically acceptable salt thereof. In some aspects, the oligonucleotide consists of a nucleobase sequence selected from the group consisting of any of SEQ ID NOs: 3091-3296 and 5167, or a pharmaceutically acceptable salt thereof. In some aspects, the oligonucleotide consists of a nucleobase sequence selected from the group consisting of any of SEQ ID NOs: 3091-3296, or a pharmaceutically acceptable salt thereof. In some aspects, the oligonucleotide consists of a nucleobase sequence selected from the group consisting of any of SEQ ID NOs: 3297-3502 and 5168, or a pharmaceutically acceptable salt thereof. In some aspects, the oligonucleotide consists of a nucleobase sequence selected from the group consisting of any of SEQ ID NOs: 3297-3502, or a pharmaceutically acceptable salt thereof. In some aspects, the oligonucleotide consists of a nucleobase sequence selected from the group consisting of any of SEQ ID NOs: 3503-3708 and 5169, or a pharmaceutically acceptable salt thereof. In some aspects, the oligonucleotide consists of a nucleobase sequence selected from the group consisting of any of SEQ ID NOs: 3503-3708, or a pharmaceutically acceptable salt thereof. In some aspects, the oligonucleotide consists of a nucleobase sequence selected from the group consisting of any of SEQ ID NOs: 3709-3914 and 5170, or a pharmaceutically acceptable salt thereof. In some aspects, the oligonucleotide consists of a nucleobase sequence selected from the group consisting of any of SEQ ID NOs: 3709-3914, or a pharmaceutically acceptable salt thereof. In some aspects, the oligonucleotide consists of a nucleobase sequence selected from the group consisting of any of SEQ ID NOs: 3915-4120 and 5171, or a pharmaceutically acceptable salt thereof. In some aspects, the oligonucleotide consists of a nucleobase sequence selected from the group consisting of any of SEQ ID NOs: 3915-4120, or a pharmaceutically acceptable salt thereof. In some aspects, the oligonucleotide consists of a nucleobase sequence selected from the group consisting of any of SEQ ID NOs: 4121-4326 and 5172, or a pharmaceutically acceptable salt thereof. In some aspects, the oligonucleotide consists of a nucleobase sequence selected from the group consisting of any of SEQ ID NOs: 4121-4326, or a pharmaceutically acceptable salt thereof. In some aspects, the oligonucleotide consists of a nucleobase sequence selected from the group consisting of any of SEQ ID NOs: 4327-4532 and 5173, or a pharmaceutically acceptable salt thereof. In some aspects, the oligonucleotide consists of a nucleobase sequence selected from the group consisting of any of SEQ ID NOs: 4327-4532, or a pharmaceutically acceptable salt thereof. In some aspects, the oligonucleotide consists of a nucleobase sequence selected from the group consisting of any of SEQ ID NOs: 4533-4738 and 5174, or a pharmaceutically acceptable salt thereof. In some aspects, the oligonucleotide consists of a nucleobase sequence selected from the group consisting of any of SEQ ID NOs: 4533-4738, or a pharmaceutically acceptable salt thereof. In some aspects, the oligonucleotide consists of a nucleobase sequence selected from the group consisting of any of SEQ ID NOs: 4739-4944 and 5175, or a pharmaceutically acceptable salt thereof. In some aspects, the oligonucleotide consists of a nucleobase sequence selected from the group consisting of any of SEQ ID NOs: 4739-4944, or a pharmaceutically acceptable salt thereof. In some aspects, the oligonucleotide consists of a nucleobase sequence selected from the group consisting of any of SEQ ID NOs: 4945-5150 and 5176, or a pharmaceutically acceptable salt thereof. In some aspects, the oligonucleotide consists of a nucleobase sequence selected from the group consisting of any of SEQ ID NOs: 4945-5150, or a pharmaceutically acceptable salt thereof.

[0145] Some aspects of the disclosure relate to single-stranded oligonucleotides, wherein the nucleobase sequence of the oligonucleotide consists of any one of SEQ ID NOs: 1-5150 and 5152-5176, or a pharmaceutically acceptable salt thereof. In some aspects, the nucleobase sequence of the oligonucleotide consists of any one of SEQ ID NOs: 1-5150, or a pharmaceutically acceptable salt thereof. In some aspects, the nucleobase sequence of the oligonucleotide consists of any one of SEQ ID NOs: 1-206 and 5152, or a pharmaceutically acceptable salt thereof. In some aspects, the nucleobase sequence of the oligonucleotide consists of any one of SEQ ID NOs: 1-206, or a pharmaceutically acceptable salt thereof. In some aspects, the oligonucleotide consists of the nucleobase sequence of any one of SEQ ID NOs: 207-412 and 5153, or a pharmaceutically acceptable salt thereof. In some aspects, the oligonucleotide consists of the nucleobase sequence of any one of SEQ ID NOs: 207-412, or a pharmaceutically acceptable salt thereof. In some aspects, the oligonucleotide consists of the nucleobase sequence of any one of SEQ ID NOs: 413-618 and 5154, or a pharmaceutically acceptable salt thereof. In some aspects, the oligonucleotide consists of the nucleobase sequence of any one of SEQ ID NOs: 413-618, or a pharmaceutically acceptable salt thereof. In some aspects, the oligonucleotide consists of the nucleobase sequence of any one of SEQ ID NOs: 619-824 and 5155, or a pharmaceutically acceptable salt thereof. In some aspects, the oligonucleotide consists of the nucleobase sequence of any one of SEQ ID NOs: 619-824, or a pharmaceutically acceptable salt thereof. In some aspects, the oligonucleotide consists of the nucleobase sequence of any one of SEQ ID NOs: 825-1030 and 5156, or a pharmaceutically acceptable salt thereof. In some aspects, the oligonucleotide consists of the nucleobase sequence of any one of SEQ ID NOs: 825-1030 or a pharmaceutically acceptable salt thereof. In some aspects, the oligonucleotide consists of the nucleobase sequence of any one of SEQ ID NOs: 1031-1236 and 5157, or a pharmaceutically acceptable salt thereof. In some aspects, the oligonucleotide consists of the nucleobase sequence of any one of SEQ ID NOs: 1031-1236, or a pharmaceutically acceptable salt thereof. In some aspects, the oligonucleotide consists of the nucleobase sequence of any one of SEQ ID NOs: 1237-1442 and 5158, or a pharmaceutically acceptable salt thereof. In some aspects, the oligonucleotide consists of the nucleobase sequence of any one of SEQ ID NOs: 1237-1442, or a pharmaceutically acceptable salt thereof. In some aspects, the oligonucleotide consists of the nucleobase sequence of any one of SEQ ID NOs: 1443-1648 and 5159, or a pharmaceutically acceptable salt thereof. In some aspects, the oligonucleotide consists of the nucleobase sequence of any one of SEQ ID NOs: 1443-1648, or a pharmaceutically acceptable salt thereof. In some aspects, the oligonucleotide consists of the nucleobase sequence of any one of SEQ ID NOs: 1649-1854 and 5160 or a pharmaceutically acceptable salt thereof. In some aspects, the oligonucleotide consists of the nucleobase sequence of any one of SEQ ID NOs: 1649-1854, or a pharmaceutically acceptable salt thereof. In some aspects, the oligonucleotide consists of the nucleobase sequence of any one of SEQ ID NOs: 1855-2060 and 5161, or a pharmaceutically acceptable salt thereof. In some aspects, the oligonucleotide consists of the nucleobase sequence of any one of SEQ ID NOs: 1855-2060, or a pharmaceutically acceptable salt thereof. In some aspects, the oligonucleotide consists of the nucleobase sequence of any one of SEQ ID NOs: 2061-2266 and 5162, or a pharmaceutically acceptable salt thereof. In some aspects, the oligonucleotide consists of the nucleobase sequence of any one of SEQ ID NOs: 2061-2266, or a pharmaceutically acceptable salt thereof. In some aspects, the oligonucleotide consists of the nucleobase sequence of any one of SEQ ID NOs: 2267-2472 and 5163, or a pharmaceutically acceptable salt thereof. In some aspects, the oligonucleotide consists of the nucleobase sequence of any one of SEQ ID NOs: 2267-2472, or a pharmaceutically acceptable salt thereof. In some aspects, the oligonucleotide consists of the nucleobase sequence of any one of SEQ ID NOs: 2473-2678 and 5164, or a pharmaceutically acceptable salt thereof. In some aspects, the oligonucleotide consists of the nucleobase sequence of any one of SEQ ID NOs: 2473-2678, or a pharmaceutically acceptable salt thereof. In some aspects, the oligonucleotide consists of the nucleobase sequence of any one of SEQ ID NOs: 2679-2884 and 5165, or a pharmaceutically acceptable salt thereof. In some aspects, the oligonucleotide consists of the nucleobase sequence of any one of SEQ ID NOs: 2679-2884, or a pharmaceutically acceptable salt thereof. In some aspects, the oligonucleotide consists of the nucleobase sequence of any one of SEQ ID NOs: 2885-3090 and 5166, or a pharmaceutically acceptable salt thereof. In some aspects, the oligonucleotide consists of the nucleobase sequence of any one of SEQ ID NOs: 2885-3090, or a pharmaceutically acceptable salt thereof. In some aspects, the oligonucleotide consists of the nucleobase sequence of any one of SEQ ID NOs: 3091-3296 and 5167, or a pharmaceutically acceptable salt thereof. In some aspects, the oligonucleotide consists of the nucleobase sequence of any one of SEQ ID NOs: 3091-3296, or a pharmaceutically acceptable salt thereof. In some aspects, the oligonucleotide consists of the nucleobase sequence of any one of SEQ ID NOs: 3297-3502 and 5168, or a pharmaceutically acceptable salt thereof. In some aspects, the oligonucleotide consists of the nucleobase sequence of any one of SEQ ID NOs: 3297-3502, or a pharmaceutically acceptable salt thereof. In some aspects, the oligonucleotide consists of the nucleobase sequence of any one of SEQ ID NOs: 3503-3708 and 5169, or a pharmaceutically acceptable salt thereof. In some aspects, the oligonucleotide consists of the nucleobase sequence of any one of SEQ ID NOs: 3503-3708, or a pharmaceutically acceptable salt thereof. In some aspects, the oligonucleotide consists of the nucleobase sequence of any one of SEQ ID NOs: 3709-3914 and 5170, or a pharmaceutically acceptable salt thereof. In some aspects, the oligonucleotide consists of the nucleobase sequence of any one of SEQ ID NOs: 3709-3914, or a pharmaceutically acceptable salt thereof. In some aspects, the oligonucleotide consists of the nucleobase sequence of any one of SEQ ID NOs: 3915-4120 and 5171, or a pharmaceutically acceptable salt thereof. In some aspects, the oligonucleotide consists of the nucleobase sequence of any one of SEQ ID NOs: 3915-4120, or a pharmaceutically acceptable salt thereof. In some aspects, the oligonucleotide consists of the nucleobase sequence of any one of SEQ ID NOs: 4121-4326 and 5172, or a pharmaceutically acceptable salt thereof. In some aspects, the oligonucleotide consists of the nucleobase sequence of any one of SEQ ID NOs: 4121-4326, or a pharmaceutically acceptable salt thereof. In some aspects, the oligonucleotide consists of the nucleobase sequence of any one of SEQ ID NOs: 4327-4532 and 5173, or a pharmaceutically acceptable salt thereof. In some aspects, the oligonucleotide consists of the nucleobase sequence of any one of SEQ ID NOs: 4327-4532, or a pharmaceutically acceptable salt thereof. In some aspects, the oligonucleotide consists of the nucleobase sequence of any one of SEQ ID NOs: 4533-4738 and 5174, or a pharmaceutically acceptable salt thereof. In some aspects, the oligonucleotide consists of the nucleobase sequence of any one of SEQ ID NOs: 4533-4738, or a pharmaceutically acceptable salt thereof. In some aspects, the oligonucleotide consists of the nucleobase sequence of any one of SEQ ID NOs: 4739-4944 and 5175, or a pharmaceutically acceptable salt thereof. the oligonucleotide consists of the nucleobase sequence of any one of SEQ ID NOs: 4739-4944, or a pharmaceutically acceptable salt thereof. In some aspects, the oligonucleotide consists of the nucleobase sequence of any one of SEQ ID NOs: 4945-5150 and 5176, or a pharmaceutically acceptable salt thereof. In some aspects, the oligonucleotide consists of the nucleobase sequence of any one of SEQ ID NOs: 4945-5150, or a pharmaceutically acceptable salt thereof. In some aspects, the oligonucleotide consists of the nucleobase sequence selected from the group consisting of any one of SEQ ID NOs: 5152-5176, or a pharmaceutically acceptable salt thereof.

[0146] Some aspects of the disclosure relate to oligonucleotides selected from the group consisting of Antisense Oligo Nos. 1-5150 and 5152-5176 of Table 3, or a pharmaceutically acceptable salt thereof. In some aspects, the oligonucleotide is selected from the group consisting of Antisense Oligo Nos. 1-5150 of Table 3, or a pharmaceutically acceptable salt thereof. In some aspects, the oligonucleotide is selected from the group consisting of Antisense Oligo Nos. 1-206 and 5152 of Table 3, or a pharmaceutically acceptable salt thereof. In some aspects, the oligonucleotide is selected from the group consisting of Antisense Oligo Nos. 1-206 of Table 3, or a pharmaceutically acceptable salt thereof. In some aspects, the oligonucleotide is selected from the group consisting of Antisense Oligo Nos. 207-412 and 5153 of Table 3, or a pharmaceutically acceptable salt thereof. In some aspects, the oligonucleotide is selected from the group consisting of Antisense Oligo Nos. 207-412 of Table 3, or a pharmaceutically acceptable salt thereof. In some aspects, the oligonucleotide is selected from the group consisting of Antisense Oligo Nos. 413-618 and 5154 of Table 3, or a pharmaceutically acceptable salt thereof. In some aspects, the oligonucleotide is selected from the group consisting of Antisense Oligo Nos. 413-618 of Table 3, or a pharmaceutically acceptable salt thereof. In some aspects, the oligonucleotide is selected from the group consisting of Antisense Oligo Nos. 619-824 and 5155 of Table 3, or a pharmaceutically acceptable salt thereof. In some aspects, the oligonucleotide is selected from the group consisting of Antisense Oligo Nos. 619-824 of Table 3, or a pharmaceutically acceptable salt thereof. In some aspects, the oligonucleotide is selected from the group consisting of Antisense Oligo Nos. 825-1030 and 5156 of Table 3, or a pharmaceutically acceptable salt thereof. In some aspects, the oligonucleotide is selected from the group consisting of Antisense Oligo Nos. 825-1030 of Table 3, or a pharmaceutically acceptable salt thereof. In some aspects, the oligonucleotide is selected from the group consisting of Antisense Oligo Nos. 1031-1236 and 5157 of Table 3, or a pharmaceutically acceptable salt thereof. In some aspects, the oligonucleotide is selected from the group consisting of Antisense Oligo Nos. 1031-1236 of Table 3, or a pharmaceutically acceptable salt thereof. In some aspects, the oligonucleotide is selected from the group consisting of Antisense Oligo Nos. 1237-1442 and 5158 of Table 3, or a pharmaceutically acceptable salt thereof. In some aspects, the oligonucleotide is selected from the group consisting of Antisense Oligos Nos. 1237-1442 of Table 3, or a pharmaceutically acceptable salt thereof. In some aspects, the oligonucleotide is selected from the group consisting of Antisense Oligos Nos. 1443-1648 and 5159 of Table 3, or a pharmaceutically acceptable salt thereof. In some aspects, the oligonucleotide is selected from the group consisting of Antisense Oligo Nos. 1443-1648 of Table 3, or a pharmaceutically acceptable salt thereof. In some aspects, the oligonucleotide is selected from the group consisting of Antisense Oligo Nos. 1649-1854 and 5160 of Table 3, or a pharmaceutically acceptable salt thereof. In some aspects, the oligonucleotide is selected from the group consisting of Antisense Oligo Nos. 1649-1854 of Table 3, or a pharmaceutically acceptable salt thereof. In some aspects, the oligonucleotide is selected from the group consisting of Antisense Oligo Nos. 1855-2060 and 5161 of Table 3, or a pharmaceutically acceptable salt thereof. In some aspects, the oligonucleotide is selected from the group consisting of Antisense Oligo Nos. 1855-2060 of Table 3 or a pharmaceutically acceptable salt thereof. In some aspects, the oligonucleotide is selected from the group consisting of Antisense Oligo Nos. 2061-2266 and 5162 of Table 3, or a pharmaceutically acceptable salt thereof. In some aspects, the oligonucleotide is selected from the group consisting of Antisense Oligo Nos. 2061-2266 of Table 3, or a pharmaceutically acceptable salt thereof. In some aspects, the oligonucleotide is selected from the group consisting of Antisense Oligo Nos. 2267-2472 and 5163 of Table 3, or a pharmaceutically acceptable salt thereof. In some aspects, the oligonucleotide is selected from the group consisting of Antisense Oligo Nos. 2267-2472 of Table 3, or a pharmaceutically acceptable salt thereof. In some aspects, the oligonucleotide is selected from the group consisting of Antisense Oligo Nos. 2473-2678 and 5164 of Table 3, or a pharmaceutically acceptable salt thereof. In some aspects, the oligonucleotide is Antisense Oligo No. 2473-2678 of Table 3, or a pharmaceutically acceptable salt thereof. In some aspects, the oligonucleotide is selected from the group consisting of Antisense Oligo Nos. 2679-2884 and 5165 of Table 3, or a pharmaceutically acceptable salt thereof. In some aspects, the oligonucleotide is selected from the group consisting of Antisense Oligo Nos. 2679-2884 of Table 3, or a pharmaceutically acceptable salt thereof. In some aspects, the oligonucleotide is selected from the group consisting of Antisense Oligo Nos. 2885-3090 and 5166 of Table 3, or a pharmaceutically acceptable salt thereof. In some aspects, the oligonucleotide is selected from the group consisting of Antisense Oligo Nos. 2885-3090 of Table 3, or a pharmaceutically acceptable salt thereof. In some aspects, the oligonucleotide is selected from the group consisting of Antisense Oligo Nos. 3091-3296 and 5167 of Table 3, or a pharmaceutically acceptable salt thereof. In some aspects, the oligonucleotide is selected from the group consisting of Antisense Oligo Nos. 3091-3296 of Table 3, or a pharmaceutically acceptable salt thereof. In some aspects, the oligonucleotide is selected from the group consisting of Antisense Oligo Nos. 3297-3502 and 5168 of Table 3, or a pharmaceutically acceptable salt thereof. In some aspects, the oligonucleotide is selected from the group consisting of Antisense Oligo Nos. 3297-3502 of Table 3, or a pharmaceutically acceptable salt thereof. In some aspects, the oligonucleotide is selected from the group consisting of Antisense Oligo Nos. 3503-3708 and 5169 of Table 3, or a pharmaceutically acceptable salt thereof. In some aspects, the oligonucleotide is selected from the group consisting of Antisense Oligo Nos. 3503-3708 of Table 3, or a pharmaceutically acceptable salt thereof. In some aspects, the oligonucleotide is selected from the group consisting of Antisense Oligo Nos. 3709-3914 and 5170 of Table 3, or a pharmaceutically acceptable salt thereof. In some aspects, the oligonucleotide is selected from the group consisting of Antisense Oligo Nos. 3709-3914 of Table 3, or a pharmaceutically acceptable salt thereof. In some aspects, the oligonucleotide is selected from the group consisting of Antisense Oligo Nos. 3915-4120 and 5171 of Table 3, or a pharmaceutically acceptable salt thereof. In some aspects, the oligonucleotide is selected from the group consisting of Antisense Oligo Nos. 3915-4120 of Table 3, or a pharmaceutically acceptable salt thereof. In some aspects, the oligonucleotide is selected from the group consisting of Antisense Oligo Nos. 4121-4326 and 5172 of Table 3, or a pharmaceutically acceptable salt thereof. In some aspects, the oligonucleotide is selected from the group consisting of Antisense Oligo Nos. 4121-4326 of Table 3, or a pharmaceutically acceptable salt thereof. In some aspects, the oligonucleotide is selected from the group consisting of Antisense Oligo Nos. 4327-4532 and 5173 of Table 3, or a pharmaceutically acceptable salt thereof. In some aspects, the oligonucleotide is selected from the group consisting of Antisense Oligo Nos. 4327-4532 of Table 3, or a pharmaceutically acceptable salt thereof. In some aspects, the oligonucleotide is selected from the group consisting of Antisense Oligo Nos. 4533-4738 and 5174 of Table 3, or a pharmaceutically acceptable salt thereof. In some aspects, oligonucleotide is selected from the group consisting of Antisense Oligo Nos. 4533-4738 of Table 3, or a pharmaceutically acceptable salt thereof. In some aspects, the oligonucleotide is selected from the group consisting of Antisense Oligo Nos. 4739-4944 and 5175 of Table 3, or a pharmaceutically acceptable salt thereof. In some aspects, the oligonucleotide is selected from the group consisting of Antisense Oligo Nos. 4739-4944 of Table 3, or a pharmaceutically acceptable salt thereof. In some aspects, the oligonucleotide is selected from the group consisting of Antisense Oligo Nos. 4945-5150 and 5176 of Table 3, or a pharmaceutically acceptable salt thereof. In some aspects, the oligonucleotide is selected from the group consisting of Antisense Oligo Nos. 4945-5150 of Table 3, or a pharmaceutically acceptable salt thereof. In some aspects, the oligonucleotide is selected from the group consisting of Antisense Oligo Nos. 5152-5176 of Table 3, or a pharmaceutically acceptable salt thereof.

[0147] In some aspects, the oligonucleotide, or a pharmaceutically acceptable salt thereof, causes at least a 50% reduction in MSH3 mRNA expression at an oligonucleotide concentration of 10 nM. In some aspects, the oligonucleotide, or a pharmaceutically acceptable salt thereof, causes at least a 60% reduction in MSH3 mRNA expression at an oligonucleotide concentration of 10 nM. In some aspects, the oligonucleotide, or a pharmaceutically acceptable salt thereof, causes at least a 70% reduction in MSH3 mRNA expression at an oligonucleotide concentration of 10 nM. In some aspects, the oligonucleotide, or a pharmaceutically acceptable salt thereof, causes at least an 80% reduction in MSH3 mRNA expression at an oligonucleotide concentration of 10 nM.

[0148] In some aspects, the oligonucleotide, or a pharmaceutically acceptable salt thereof, causes at least a 50% reduction in MSH3 mRNA expression at an oligonucleotide concentration of 1 nM. In some aspects, the oligonucleotide, or a pharmaceutically acceptable salt thereof, causes at least a 60% reduction in MSH3 mRNA expression at an oligonucleotide concentration of 1 nM. In some aspects, the oligonucleotide, or a pharmaceutically acceptable salt thereof, causes at least a 70% reduction in MSH3 mRNA expression at an oligonucleotide concentration of 1 nM.

[0149] The cell assay can comprise transfecting mammalian cells, such as HEK293, NIH3T3, or HeLa cells, with the desired a concentration of oligonucleotide (e.g., 1 nM or 10 nM) using Lipofectamine 2000 (Invitrogen) and comparing MSH3 mRNA levels of transfected cells to MSH3 levels of control cells. Control cells can be transfected with oligonucleotides not specific to MSH3 or mock transfected. mRNA levels can be determined using RT-qPCR and MSH3 mRNA levels can be normalized to GAPDH mRNA levels. The percent inhibition can be calculated as the percent of MSH3 mRNA concentration relative to the MSH3 concentration of the control cells.

[0150] In some aspects, the MSH3 mRNA expression is evaluated in vitro. In some aspects, the MSH3 mRNA expression is evaluated in a cell based assay. In some aspects, the MSH3 mRNA expression is evaluated in HeLa cells. In some aspects, the MSH3 mRNA expression is determined by the quantitative reverse transcription polymerase chain reaction (RT-qPCR). In some aspects, the MSH3 mRNA is expression is normalized to the mRNA expression of a reference gene. In some aspects, the MSH3 mRNA expression is normalized to the mRNA expression of beta-glucuronidase (GUSB). In some aspects, the reduction in MSH3 mRNA expression is relative to a control. In some aspects, the control is the MSH3 mRNA expression in the absence of the oligonucleotide, or pharmaceutically acceptable salt thereof. In some aspects, the control is the MSH3 mRNA expression in the absence of the oligonucleotide, or pharmaceutically acceptable salt thereof, but in the presence of a control oligonucleotide, or salt thereof. In some aspects, the control oligonucleotide, or salt thereof, is a scrambled luciferase targeting oligonucleotide. In some aspects, the reduction in MSH3 mRNA expression is calculated by a delta-delta Ct (ΔΔCT) method. In some aspects, the delta-delta Ct (ΔΔCT) method comprises the normalization of the MSH3 mRNA expression to the mRNA expression of a reference gene and to the MSH3 mRNA expression in the absence of the oligonucleotide, or pharmaceutically acceptable salt thereof but in the presence of a control oligonucleotide, or salt thereof. In some aspects, the reference gene is beta-glucuronidase (GUSB) and/or the control oligonucleotide, or salt thereof, is a scrambled luciferase targeting oligonucleotide. In some aspects, the reduction in MSH3 mRNA expression is determined by the method of Example 1. In some aspects, in the same assay, Antisense Oligo No. 1 causes approximately a 58% reduction in MSH3 mRNA expression at an oligonucleotide concentration of 10 nM. In some aspects, in the same assay, Antisense Oligo No. 1 causes approximately a 14% reduction in MSH3 mRNA expression at an oligonucleotide concentration of 1 nM.

[0151] In some aspects, the oligonucleotide, or contiguous nucleotide region thereof, has a gapmer design or structure also referred herein merely as “gapmer.” In a gapmer structure the oligonucleotide comprises at least three distinct structural regions a 5′-flanking sequence (also known as a 5′-wing), a DNA core sequence (also known as a gap) and a 3′-flanking sequence (also known as a 3′-wing), in ‘5->3’ orientation. In this design, the 5′ and 3′ flanking sequences comprise at least one alternative nucleoside which is adjacent to a DNA core sequence, and can, in some aspects, comprise a contiguous stretch of 2-7 alternative nucleosides, or a contiguous stretch of alternative and DNA nucleosides (mixed flanking sequences comprising both alternative and DNA nucleosides).

[0152] The length of the 5′-flanking sequence region can be at least two nucleosides in length (e.g., at least at least 2, at least 3, at least 4, at least 5, at least 6, or more nucleosides in length). The length of the 3′-flanking sequence region can be at least two nucleosides in length (e.g., at least 2, at least 3, at least at least 4, at least 5, at least 6, or more nucleosides in length). The 5′ and 3′ flanking sequences can be symmetrical or asymmetrical with respect to the number of nucleosides they comprise. In some aspects, the DNA core sequence comprises about 10 nucleosides flanked by a 5′ and a 3′ flanking sequence each comprising about 5 nucleosides. In some aspects, the DNA core sequence comprises about 11 nucleosides flanked by a 5′ and a 3′ flanking sequence each comprising about 5 or about 6 nucleosides. In some aspects, the DNA core sequence comprises about 12 nucleosides flanked by a 5′ sequence comprising about 5 nucleosides, and a 3′ flanking sequence comprising about 6 nucleosides. In some aspects, the DNA core sequence comprises about 12 nucleosides flanked by a 5′ sequence comprising about 6 nucleosides, and a 3′ flanking sequence comprising about 5 nucleosides. In some aspects, the DNA core sequence comprises about 12 nucleosides flanked by a 5′ and a 3′ flanking sequence each comprising about 6 nucleosides.

[0153] Consequently, the nucleosides of the 5′ flanking sequence and the 3′ flanking sequence which are adjacent to the DNA core sequence are alternative nucleosides, such as 2′ alternative nucleosides. The DNA core sequence comprises a contiguous stretch of nucleotides which are capable of recruiting RNase H, when the oligonucleotide is in duplex with the MSH3 target nucleic acid. In some aspects, the DNA core sequence comprises a contiguous stretch of 5-16 DNA nucleosides. In other aspects, the DNA core sequence comprises a region of at least 10 contiguous nucleobases having at least 80% (e.g., at least 85%, at least 90%, at least 95%, or at least 99%) complementarity to an MSH3 gene. In some aspects, the gapmer comprises a region complementary to at least 17 contiguous nucleotides, 19-23 contiguous nucleotides, or 19 contiguous nucleotides of a MSH3 gene. The gapmer is complementary to the MSH3 target nucleic acid, and can therefore be the contiguous nucleoside region of the oligonucleotide. In some aspects, the gapmer comprises a region complementary to at least 21 contiguous nucleotides, 20-25 contiguous nucleotides, or 23 contiguous nucleotides of a MSH3 gene. The gapmer is complementary to the MSH3 target nucleic acid, and can therefore be the contiguous nucleoside region of the oligonucleotide.

[0154] The 5′ and 3′ flanking sequences, flanking the 5′ and 3′ ends of the DNA core sequence, can comprise one or more affinity enhancing alternative nucleosides. In some aspects, the 5′ and/or 3′ flanking sequence comprises at least one 2′-O-methoxyethyl (MOE) nucleoside. In some aspects, the 5′ and/or 3′ flanking sequences, contain at least two MOE nucleosides. In some aspects, the 5′ flanking sequence comprises at least one, at least two, at least three, at least four, at least five, or at least six or more MOE nucleosides. In some aspects, the 5′ flanking sequence comprises at least one, at least two, at least three, at least four, at least five, or at least six or more MOE nucleosides. In some aspects, both the 5′ and 3′ flanking sequence comprise a MOE nucleoside. In some aspects, all the nucleosides in the flanking sequences are MOE nucleosides. In other aspects, the flanking sequence can comprise both MOE nucleosides and other nucleosides (mixed flanking sequence), such as DNA nucleosides and/or non-MOE alternative nucleosides, such as bicyclic nucleosides (BNAs) (e.g., LNA nucleosides (e.g., A-LNA, 5mC L-NA, G-LNA, T-LNA) or cET nucleosides), or other 2′ substituted nucleosides. In this case the DNA core sequence is defined as a contiguous sequence of at least 5 RNase H recruiting nucleosides (such as 5-16 DNA nucleosides) flanked at the 5′ and 3′ end by an affinity enhancing alternative nucleoside, such as an MOE nucleoside.

[0155] In other aspects, the 5′ and/or 3′ flanking sequence comprises at least one BNA (e.g., at least one LNA nucleoside (e.g., A-LNA, 5mC L-NA, G-LNA, T-LNA) or cET nucleoside). In some aspects, 5′ and/or 3′ flanking sequence comprises at least 2 bicyclic nucleosides. In some aspects, the 5′ flanking sequence comprises at least one BNA. In some aspects, both the 5′ and 3′ flanking sequence comprise a BNA. In some aspects, all the nucleosides in the flanking sequences are BNAs. In other aspects, the flanking sequence can comprise both BNAs and other nucleosides (mixed flanking sequences), such as DNA nucleosides and/or non-BNA alternative nucleosides, such as 2′ substituted nucleosides. In this case the DNA core sequence is defined as a contiguous sequence of at least five RNase H recruiting nucleosides (such as 5-16 DNA nucleosides) flanked at the 5′ and 3′ end by an affinity enhancing alternative nucleoside, such as a BNA, such as an LNA, such as beta-D-oxy-LNA.

[0156] The 5′ flank attached to the 5′ end of the DNA core sequence comprises, contains, or consists of at least one alternative sugar moiety (e.g., at least three, at least four, at least five, at least six, at least seven, or more alternative sugar moieties). In some aspects, the flanking sequence comprises or consists of from 1 to 7 alternative nucleobases, such as from 2 to 6 alternative nucleobases, such as from 2 to 5 alternative nucleobases, such as from 2 to 4 alternative nucleobases, such as from 1 to 3 alternative nucleobases, such as one, two, three or four alternative nucleobases. In some aspects, the flanking sequence comprises or consists of at least one alternative internucleoside linkage (e.g., at least three, at least four, at least five, at least six, at least seven, or more alternative internucleoside linkages).

[0157] The 3′ flank attached to the 3′ end of the DNA core sequence comprises, contains, or consists of at least one alternative sugar moiety (e.g., at least three, at least four, at least five, at least six, at least seven, or more alternative sugar moieties). In some aspects, the flanking sequence comprises or consists of from 1 to 7 alternative nucleobases, such as from 2 to 6 alternative nucleobases, such as from 2 to 5 alternative nucleobases, such as from 2 to 4 alternative nucleobases, such as from 1 to 3 alternative nucleobases, such as one, two, three, or four alternative nucleobases. In some aspects, the flanking sequence comprises or consists of at least one alternative internucleoside linkage (e.g., at least three, at least four, at least five, at least six, at least seven, or more alternative internucleoside linkages).

[0158] In an aspect, one or more or all of the alternative sugar moieties in the flanking sequence are 2′ alternative sugar moieties.

[0159] In a further aspect, one or more of the 2′ alternative sugar moieties in the wing regions are selected from 2′-O-alkyl-sugar moieties, 2′-O-methyl-sugar moieties, 2′-amino-sugar moieties, 2′-fluoro-sugar moieties, 2′-alkoxy-sugar moieties, MOE sugar moieties, LNA sugar moieties, arabino nucleic acid (ANA) sugar moieties, and 2′-fluoro-ANA sugar moieties.

[0160] In one aspect, all the alternative nucleosides in the flanking sequences are bicyclic nucleosides. In a further aspect, the bicyclic nucleosides in the flanking sequences are independently selected from the group consisting of oxy-LNA, thio-LNA, amino-LNA, cET, and/or ENA, in either the beta-D or alpha-L configurations or combinations thereof.

[0161] In some aspects, the one or more alternative internucleoside linkages in the flanking sequences are phosphorothioate internucleoside linkages. In some aspects, the phosphorothioate linkages are stereochemically pure phosphorothioate linkages. In some aspects, the phosphorothioate linkages are Sp phosphorothioate linkages. In other aspects, the phosphorothioate linkages are Rp phosphorothioate linkages. In some aspects, the alternative internucleoside linkages are 2′-alkoxy internucleoside linkages. In other aspects, the alternative internucleoside linkages are alkyl phosphate internucleoside linkages.

[0162] The DNA core sequence can comprise, contain, or consist of at least 5-16 consecutive DNA nucleosides capable of recruiting RNase H. In some aspects, all of the nucleosides of the DNA core sequence are DNA units. In further aspects, the DNA core region can consist of a mixture of DNA and other nucleosides capable of mediating RNase H cleavage. In some aspects, at least 50% of the nucleosides of the DNA core sequence are DNA, such as at least 60%, at least 70% or at least 80%, or at least 90% DNA. In some aspects, all of the nucleosides of the DNA core sequence are RNA units.

[0163] The oligonucleotide comprises a contiguous region which is complementary to the target nucleic acid. In some aspects, the oligonucleotide can further comprise additional linked nucleosides positioned 5′ and/or 3′ to either the 5′ and 3′ flanking sequences. These additional linked nucleosides can be attached to the 5′ end of the 5′ flanking sequence or the 3′ end of the 3′ flanking sequence, respectively. The additional nucleosides can, in some aspects, form part of the contiguous sequence which is complementary to the target nucleic acid, or in other aspects, can be non-complementary to the target nucleic acid.

[0164] The inclusion of the additional nucleosides at either, or both of the 5′ and 3′ flanking sequences can independently comprise one, two, three, four, or five additional nucleotides, which can be complementary or non-complementary to the target nucleic acid. In this respect the oligonucleotide, can in some aspects comprise a contiguous sequence capable of modulating the target which is flanked at the 5′ and/or 3′ end by additional nucleotides. Such additional nucleosides can serve as a nuclease susceptible biocleavable linker, and can therefore be used to attach a functional group such as a conjugate moiety to the oligonucleotide. In some aspects, the additional 5′ and/or 3′ end nucleosides are linked with phosphodiester linkages, and can be DNA or RNA. In another aspect, the additional 5′ and/or 3′ end nucleosides are alternative nucleosides which can for example be included to enhance nuclease stability or for ease of synthesis.

[0165] In other aspects, the oligonucleotides utilize “altimer” design and comprise alternating 2′-fluoro-ANA and DNA regions that are alternated every three nucleosides. Altimer oligonucleotides are discussed in more detail in Min, et al., Bioorganic & Medicinal Chemistry Letters, 2002, 12(18): 2651-2654 and Kalota, et al., Nuc. Acid Res. 2006, 34(2): 451-61 (herein incorporated by reference).

[0166] In other aspects, the oligonucleotides utilize “hemimer” design and comprise a single 2′-modified flanking sequence adjacent to (on either side of the 5′ or the 3′ side of) a DNA core sequence. Hemimer oligonucleotides are discussed in more detail in Geary et al., 2001, J. Pharm. Exp. Therap., 296: 898-904 (herein incorporated by reference).

[0167] In some aspects, an oligonucleotide has a nucleic acid sequence with at least 50% (e.g., at least 50%, at least 60%, at least 70%, at least 80%, at least 85%, at least 90%, at least 95%, at least 96%, at least 97%, at least 98%, at least 99%, or 100%) sequence identity to the nucleic acid sequence of any one of SEQ ID NOs: 1-384 and 390-613. In some aspects, an oligonucleotide has a nucleic acid sequence with at least 85% sequence identity to the nucleic acid sequence of any one of SEQ ID NOs: 1-384 and 390-613.

[0168] It will be understood that the nucleosides of the oligonucleotide e.g., an oligonucleotide, can comprise any one of the sequences set forth in any one of SEQ ID NOs: 1-384 that is an alternative nucleoside and/or conjugated or linked as described in detail below.

[0169] In some aspects, the oligonucleotide is an oligonucleotide having at least 15 contiguous bases of the nucleobase sequence selected from the group consisting of Antisense Oligo Nos. 1-384 of Table 3 or 390-613 of Table 4. In some aspects, the oligonucleotide is an oligonucleotide having at least 15 contiguous bases of the nucleobase sequence selected from the group consisting of Antisense Oligo Nos. 1-384 of Table 3. In some aspects, the oligonucleotide is an oligonucleotide having at least 15 contiguous bases of the nucleobase sequence selected from the group consisting one of Antisense Oligo Nos. 1-96 of Table 3. In some aspects, the oligonucleotide is an oligonucleotide having at least 15 contiguous bases of the nucleobase sequence selected from the group consisting of Antisense Oligo Nos. 97-192 of Table 3. In some aspects, the oligonucleotide is an oligonucleotide having at least 15 contiguous bases of the nucleobase sequence selected from the group consisting of Antisense Oligo Nos. 193-288 of Table 3. In some aspects, the oligonucleotide is an oligonucleotide having at least 15 contiguous bases of the nucleobase sequence selected from the group consisting of Antisense Oligo Nos. 289-384 of Table 3. In some aspects, the oligonucleotide is an oligonucleotide having at least 15 contiguous bases of the nucleobase sequence selected from the group consisting of Antisense Oligo Nos. 390-613 of Table 4. In some aspects, the oligonucleotide is an oligonucleotide having at least 15 contiguous bases of the nucleobase sequence selected from the group consisting of Antisense Oligo Nos. 390-480 of Table 4. In some aspects, the oligonucleotide is an oligonucleotide having at least 15 contiguous bases of the nucleobase sequence selected from the group consisting of Antisense Oligo Nos. 481-501 of Table 4. In some aspects, the oligonucleotide is an oligonucleotide having at least 15 contiguous bases of the nucleobase sequence selected from the group consisting of Antisense Oligo Nos. 502-592 of Table 4. In some aspects, the oligonucleotide is an oligonucleotide having at least 15 contiguous bases of the nucleobase sequence selected from the group consisting of Antisense Oligo Nos. 593-613 of Table 4.

[0170] In some aspects, the oligonucleotide is an oligonucleotide having at least 15 contiguous bases of the nucleobase sequence selected from the group consisting of Antisense Oligo Nos. 1, 6, 13, 17, 21, 24, 26, 29, 33-34, 37, 44, 49-55, 57, 60-73, 75-76, 79-82, 84-86, 88-92, or 94-96 of Table 3. In some aspects, the oligonucleotide an oligonucleotide having at least 15 contiguous bases of the nucleobase sequence of Antisense Oligo No. 6 of Table 3.

[0171] In some aspects, the oligonucleotide is an oligonucleotide having at least 15 contiguous bases of the nucleobase sequence selected from the group consisting of Antisense Oligo Nos. 97, 100, 103, 105, 108, 110-111, 113-117, 122-123, 127, 129-130, 133-136, 138-139, 141, 143-145, 147-148, 154-155, 157-165, 168-170, 172, 174-180, 184, 187, or 191 of Table 3.

[0172] In some aspects, the oligonucleotide is an oligonucleotide having at least 15 contiguous bases of the nucleobase sequence selected from the group consisting of Antisense Oligo Nos. 193-200, 202-230, 232-246, 248-253, 255, 258-261, 265, 270, 274-276, or 285-286 of Table 3. In some aspects, the oligonucleotide is an oligonucleotide having at least 15 contiguous bases of the nucleobase sequence selected from the group consisting of Antisense Oligo Nos. 226-227, 234, 240, or 243-244 of Table 3.

[0173] In some aspects, the oligonucleotide is an oligonucleotide having at least 15 contiguous bases of the nucleobase sequence selected from the group consisting of Antisense Oligo Nos. 289-290, 292, 305, 307, 313, 318, 323-324, 326, 329-330, 332, 338-339, 341, 344, or 346 of Table 3.

[0174] An oligonucleotide agent as described herein can contain one or more mismatches to the target sequence. In one aspect, an oligonucleotide as described herein contains no more than 3 mismatches. If the oligonucleotide contains mismatches to a target sequence, in some aspects, the area of mismatch is not located in the center of the region of complementarity. If the oligonucleotide contains mismatches to the target sequence, in some aspects, the mismatch should be restricted to be within the last 5 nucleotides from either the 5′- or 3′-end of the region of complementarity. For example, for a 30-linked nucleoside oligonucleotide agent, the contiguous nucleobase region which is complementary to a region of a MSH3 gene, generally does not contain any mismatch within the central 5-10 linked nucleosides. The methods described herein or methods known in the art can be used to determine whether an oligonucleotide containing a mismatch to a target sequence is effective in inhibiting the expression of a MSH3 gene. Consideration of the efficacy of oligonucleotides with mismatches in inhibiting expression of a MSH3 gene is important, especially if the particular region of complementarity in a MSH3 gene is known to have polymorphic sequence variation within the population.

[0175] Construction of vectors for expression of polynucleotides can be accomplished using conventional techniques which do not require detailed explanation to one of ordinary skill in the art. For generation of efficient expression vectors, it is necessary to have regulatory sequences that control the expression of the polynucleotide. These regulatory sequences include promoter and enhancer sequences and are influenced by specific cellular factors that interact with these sequences, and are well known in the art.

### A. Alternative Oligonucleosides

[0176] In one aspect, one or more of the linked nucleosides or internucleosidic linkages of the oligonucleotide, is naturally occurring, and does not comprise, e.g., chemical modifications and/or conjugations known in the art and described herein. In another aspect, one or more of the linked nucleosides or internucleosidic linkages of an oligonucleotide, is chemically modified to enhance stability or other beneficial characteristics. Without being bound by theory, it is believed that certain modifications can increase nuclease resistance and/or serum stability, or decrease immunogenicity. For example, oligonucleotides can contain nucleotides found to occur naturally in DNA or RNA (e.g., adenine, thymidine, guanosine, cytidine, uridine, or inosine) or can contain alternative nucleosides or internucleosidic linkages which have one or more chemical modifications to one or more components of the nucleotide (e.g., the nucleobase, sugar, or phospho-linker moiety). Oligonucleotides can be linked to one another through naturally occurring phosphodiester bonds, or can contain alternative linkages (e.g., covalently linked through phosphorothioate (e.g., Sp phosphorothioate or Rp phosphorothioate), 3′-methylenephosphonate, 5′-methylenephosphonate, 3′-phosphoamidate, 2′-5′ phosphodiester, guanidinium, S-methylthiourea, 2′-alkoxy, alkyl phosphate, or peptide bonds).

[0177] In some aspects, substantially all of the nucleosides or internucleosidic linkages of an oligonucleotide are alternative nucleosides. In other aspects, all of the nucleosides or internucleosidic linkages of an oligonucleotide are alternative nucleosides. Oligonucleotides in which “substantially all of the nucleosides are alternative nucleosides” are largely but not wholly modified and can include not more than five, four, three, two, or one naturally-occurring nucleosides. In still other aspects, oligonucleotides can include not more than five, four, three, two, or one alternative nucleosides.

[0178] The nucleic acids can be synthesized and/or modified by methods well established in the art, such as those described in “Current protocols in nucleic acid chemistry,” Beaucage, S. L. et al. (Edrs.), John Wiley & Sons, Inc., New York, N.Y., USA, which is hereby incorporated herein by reference. Alternative nucleotides and nucleosides include those with modifications including, for example, end modifications, e.g., 5′-end modifications (phosphorylation, conjugation, inverted linkages) or 3′-end modifications (conjugation, DNA nucleotides, inverted linkages, etc.); base modifications, e.g., replacement with stabilizing bases, destabilizing bases, or bases that base pair with an expanded repertoire of partners, removal of bases (abasic nucleotides), or conjugated bases; sugar modifications (e.g., at the 2′-position or 4′-position) or replacement of the sugar; and/or backbone modifications, including modification or replacement of the phosphodiester linkages. The nucleobase can be an isonucleoside in which the nucleobase is moved from the C1 position of the sugar moiety to a different position (e.g. C2, C3, C4, or C5). Specific examples of oligonucleotide compounds useful in the aspects described herein include, but are not limited to alternative nucleosides containing modified backbones or no natural internucleoside linkages. Nucleotides and nucleosides having modified backbones include, among others, those that do not have a phosphorus atom in the backbone. For the purposes of this specification, and as sometimes referenced in the art, alternative RNAs that do not have a phosphorus atom in their internucleoside backbone can be considered to be oligonucleosides. In some aspects, an oligonucleotide will have a phosphorus atom in its internucleoside backbone.

[0179] Alternative internucleoside linkages include, for example, phosphorothioates, chiral phosphorothioates, phosphorodithioates, phosphotriesters, aminoalkylphosphotriesters, methyl and other alkyl phosphonates including 3′-alkylene phosphonates and chiral phosphonates, phosphinates, phosphoramidates including 3′-amino phosphoramidate and aminoalkylphosphoramidates, thionophosphoramidates, thionoalkylphosphonates, thionoalkylphosphotriesters, and boronophosphates having normal 3′-5′ linkages, 2′-5′-linked analogs of these, and those having inverted polarity wherein the adjacent pairs of nucleoside units are linked 3′-5′ to 5′-3′ or 2′-5′ to 5′-2′. Various salts, mixed salts, and free acid forms are also included.

[0180] Representative U.S. patents that teach the preparation of the above phosphorus-containing linkages include, but are not limited to, U.S. Pat. Nos. 3,687,808; 4,469,863; 4,476,301; 5,023,243; 5,177,195; 5,188,897; 5,264,423; 5,276,019; 5,278,302; 5,286,717; 5,321,131; 5,399,676; 5,405,939; 5,453,496; 5,455,233; 5,466,677; 5,476,925; 5,519,126; 5,536,821; 5,541,316; 5,550,111; 5,563,253; 5,571,799; 5,587,361; 5,625,050; 6,028,188; 6,124,445; 6,160,109; 6,169,170; 6,172,209; 6,239,265; 6,277,603; 6,326,199; 6,346,614; 6,444,423; 6,531,590; 6,534,639; 6,608,035; 6,683,167; 6,858,715; 6,867,294; 6,878,805; 7,015,315; 7,041,816; 7,273,933; 7,321,029; and U.S. Pat. No. RE39464, the entire contents of each of which are hereby incorporated herein by reference.

[0181] Alternative internucleoside linkages that do not include a phosphorus atom therein have backbones that are formed by short chain alkyl or cycloalkyl internucleoside linkages, mixed heteroatoms and alkyl or cycloalkyl internucleoside linkages, or one or more short chain heteroatomic or heterocyclic internucleoside linkages. These include those having morpholino linkages (formed in part from the sugar portion of a nucleoside); siloxane backbones; sulfide, sulfoxide and sulfone backbones; formacetyl and thioformacetyl backbones; methylene formacetyl and thioformacetyl backbones; alkene containing backbones; sulfamate backbones; methyleneimino and methylenehydrazino backbones; sulfonate and sulfonamide backbones; amide backbones; and others having mixed N, O, S, and CH₂ component parts.

[0182] Representative U.S. patents that teach the preparation of the above oligonucleosides include, but are not limited to, U.S. Pat. Nos. 5,034,506; 5,166,315; 5,185,444; 5,214,134; 5,216,141; 5,235,033; 5,64,562; 5,264,564; 5,405,938; 5,434,257; 5,466,677; 5,470,967; 5,489,677; 5,541,307; 5,561,225; 5,596,086; 5,602,240; 5,608,046; 5,610,289; 5,618,704; 5,623,070; 5,663,312; 5,633,360; 5,677,437; and, 5,677,439, the entire contents of each of which are hereby incorporated herein by reference.

[0183] In other aspects, suitable oligonucleotides include those in which both the sugar and the internucleoside linkage, i.e., the backbone, of the nucleotide units are replaced. The base units are maintained for hybridization with an appropriate nucleic acid target compound. One such oligomeric compound, a mimetic that has been shown to have excellent hybridization properties, is referred to as a peptide nucleic acid (PNA). In PNA compounds, the sugar of a nucleoside is replaced with an amide containing backbone, in particular an aminoethylglycine backbone. The nucleobases are retained and are bound directly or indirectly to aza nitrogen atoms of the amide portion of the backbone. Representative U.S. patents that teach the preparation of PNA compounds include, but are not limited to, U.S. Pat. Nos. 5,539,082; 5,714,331; and 5,719,262, the entire contents of each of which are hereby incorporated herein by reference. Additional PNA compounds suitable for use in the oligonucleotides are described in, for example, in Nielsen et al., Science, 1991, 254, 1497-1500.

[0184] Some aspects include oligonucleotides with phosphorothioate backbones and oligonucleotides with heteroatom backbones, and in particular —CH₂—NH—CH₂—, —CH₂—N(CH₃)—O—CH₂-[known as a methylene (methylimino) or MMI backbone], —CH₂—O—N(CH₃)—CH₂—, —CH₂—N(CH₃)—N(CH₃)—CH₂— and —N(CH₃)—CH₂—CH₂-[wherein the native phosphodiester backbone is represented as —O—P—O—CH₂-] of the above-referenced U.S. Pat. No. 5,489,677, and the amide backbones of the above-referenced U.S. Pat. No. 5,602,240. In some aspects, the oligonucleotides featured herein have morpholino backbone structures of the above-referenced U.S. Pat. No. 5,034,506. In other aspects, the oligonucleotides described herein include phosphorodiamidate morpholino oligomers (PMO), in which the deoxyribose moiety is replaced by a morpholine ring, and the charged phosphodiester inter-subunit linkage is replaced by an uncharged phophorodiamidate linkage, as described in Summerton, et al., Antisense Nucleic Acid Drug Dev. 1997, 7:63-70.

[0185] Alternative nucleosides and nucleotides can contain one or more substituted sugar moieties. The oligonucleotides, e.g., oligonucleotides, featured herein can include one of the following at the 2′-position: OH; F; O-, S-, or N-alkyl; O-, S-, or N-alkenyl; O-, S- or N-alkynyl; or O-alkyl-O-alkyl, wherein the alkyl, alkenyl and alkynyl can be substituted or unsubstituted C₁ to C₁₀ alkyl or C₂ to C₁₀ alkenyl and alkynyl. Exemplary suitable modifications include —O[(CH₂)ₙO]ₘCH₃, —O(CH₂)ₙOCH₃, —O(CH₂)ₙ—NH₂, —O(CH₂)ₙCH₃, —O(CH₂)ₙ—ONH₂, and —O(CH₂)ₙ—ON[(CH₂)ₙCH₃]₂, where n and m are from 1 to about 10. In other aspects, oligonucleotides include one of the following at the 2′ position: C₁ to C₁₀ lower alkyl, substituted lower alkyl, alkaryl, aralkyl, O-alkaryl or O-aralkyl, SH, SCH₃, OCN, Cl, Br, CN, CF₃, OCF₃, SOCH₃, SO₂CH₃, ONO₂, NO₂, N₃, NH₂, heterocycloalkyl, heterocycloalkaryl, aminoalkylamino, polyalkylamino, substituted silyl, an RNA cleaving group, a reporter group, an intercalator, a group for improving the pharmacokinetic properties of an oligonucleotide, or a group for improving the pharmacodynamic properties of an oligonucleotide, and other substituents having similar properties. In some aspects, the modification includes a 2′-methoxyethoxy (2′-O—CH₂CH₂OCH₃, also known as 2′-O-(2-methoxyethyl) or 2′-MOE) (Martin et al., Helv. Chin. Acta, 1995, 78:486-504) i.e., an alkoxy-alkoxy group. MOE nucleosides confer several beneficial properties to oligonucleotides including, but not limited to, increased nuclease resistance, improved pharmacokinetics properties, reduced non-specific protein binding, reduced toxicity, reduced immunostimulatory properties, and enhanced target affinity as compared to unmodified oligonucleotides.

[0186] Another exemplary alternative contains 2′-dimethylaminooxyethoxy, i.e., a —O(CH₂)₂ON(CH₃)₂ group, also known as 2′-DMAOE, as described in examples herein below, and 2′-dimethylaminoethoxyethoxy (also known in the art as 2′-O-dimethylaminoethoxyethyl or 2′-DMAEOE), i.e., 2′-O—(CH₂)₂—O—(CH₂)₂—N(CH₃)₂. Further exemplary alternatives include: 5′-Me-2′-F nucleotides, 5′-Me-2′-OMe nucleotides, 5′-Me-2′-deoxynucleotides, (both R and S isomers in these three families); 2′-alkoxyalkyl; and 2′-NMA (N-methylacetamide).

[0187] Other alternatives include 2′-methoxy (2′-OCH₃), 2′-aminopropoxy (2′-OCH₂CH₂CH₂NH₂) and 2′-fluoro (2′-F). Similar modifications can be made at other positions on the nucleosides and nucleotides of an oligonucleotide, particularly the 3′ position of the sugar on the 3′ terminal nucleotide or in 2′-5′ linked oligonucleotides and the 5′ position of 5′ terminal nucleotide. Oligonucleotides can have sugar mimetics such as cyclobutyl moieties in place of the pentofuranosyl sugar. Representative U.S. patents that teach the preparation of such modified sugar structures include, but are not limited to, U.S. Pat. Nos. 4,981,957; 5,118,800; 5,319,080; 5,359,044; 5,393,878; 5,446,137; 5,466,786; 5,514,785; 5,519,134; 5,567,811; 5,576,427; 5,591,722; 5,597,909; 5,610,300; 5,627,053; 5,639,873; 5,646,265; 5,658,873; 5,670,633; and 5,700,920, certain of which are commonly owned with the instant application. The entire contents of each of the foregoing are hereby incorporated herein by reference.

[0188] An oligonucleotide can include nucleobase (often referred to in the art simply as “base”) alternatives (e.g., modifications or substitutions). Unmodified or natural nucleobases include the purine bases adenine (A) and guanine (G), and the pyrimidine bases thymine (T), cytosine (C) and uracil (U). Alternative nucleobases include other synthetic and natural nucleobases such as 5-methylcytidine, 5-hydroxymethylcytidine, 5-formylcytidine, 5-carboxycytidine, pyrrolocytidine, dideoxycytidine, uridine, 5-methoxyuridine, 5-hydroxydeoxyuridine, dihydrouridine, 4-thiourdine, pseudouridine, 1-methyl-pseudouridine, deoxyuridine, 5-hydroxybutynl-2′-deoxyuridine, xanthine, hypoxanthine, 7-deaza-xanthine, thienoguanine, 8-aza-7-deazaguanosine, 7-methylguanosine, 7-deazaguanosine, 6-aminomethyl-7-deazaguanosine, 8-aminoguanine, 2,2,7-trimethylguanosine, 8-methyladenine, 8-azidoadenine, 7-methyladenine, 7-deazaadenine, 3-deazaadenine, 2,6-diaminopurine, 2-aminopurine, 7-deaza-8-aza-adenine, 8-amino-adenine, thymine, dideoxythymine, 5-nitroindole, 2-aminoadenine, 6-methyl and other alkyl derivatives of adenine and guanine, 2-propyl and other alkyl derivatives of adenine and guanine, 2-thiouridine, 2-thiothymine and 2-thiocytosine, 5-halouracil and cytosine, 5-propynyl uridine and cytidine, 6-azo uridine, cytidine and thymine, 4-thiouridine, 8-halo, 8-amino, 8-thiol, 8-thioalkyl, 8-hydroxyl anal other 8-substituted adenines and guanines, 5-halo, particularly 5-bromo, 5-trifluoromethyl and other 5-substituted uridines and cytidines, 8-azaguanine and 8-azaadenine, and 3-deazaguanine. Further nucleobases include those disclosed in U.S. Pat. No. 3,687,808, those disclosed in Modified Nucleosides in Biochemistry, Biotechnology and Medicine, Herdewijn, P. ed. Wiley-VCH, 2008; those disclosed in The Concise Encyclopedia Of Polymer Science And Engineering, pages 858-859, Kroschwitz, J. L, ed. John Wiley & Sons, 1990, these disclosed by Englisch et al., (1991) Angewandte Chemie, International Edition, 30:613, and those disclosed by Sanghvi, Y S., Chapter 15, Antisense Research and Applications, pages 289-302, Crooke, S. T. and Lebleu, B., Ed., CRC Press, 1993. Certain of these nucleobases are particularly useful for increasing the binding affinity of the oligonucleotide. These include 5-substituted pyrimidines, 6-azapyrimidines, and N-2, N-6 and 0-6 substituted purines, including 2-aminopropyladenine, 5-propynyluracil, and 5-propynylcytosine. 5-methylcytosine substitutions have been shown to increase nucleic acid duplex stability by 0.6-1.2° C. (Sanghvi, Y. S., Crooke, S. T. and Lebleu, B., Eds., Antisense Research and Applications, CRC Press, Boca Raton, 1993, pp. 276-278) and are exemplary base substitutions, even more particularly when combined with 2′-O-methoxyethyl sugar modifications.

[0189] Representative U.S. patents that teach the preparation of certain of the above noted alternative nucleobases as well as other alternative nucleobases include, but are not limited to, the above noted U.S. Pat. Nos. 3,687,808, 4,845,205; 5,130,30; 5,134,066; 5,175,273; 5,367,066; 5,432,272; 5,457,187; 5,459,255; 5,484,908; 5,502,177; 5,525,711; 5,552,540; 5,587,469; 5,594,121, 5,596,091; 5,614,617; 5,681,941; 5,750,692; 6,015,886; 6,147,200; 6,166,197; 6,222,025; 6,235,887; 6,380,368; 6,528,640; 6,639,062; 6,617,438; 7,045,610; 7,427,672; and 7,495,088, the entire contents of each of which are hereby incorporated herein by reference.

[0190] In other aspects, the sugar moiety in the nucleotide can be a ribose molecule, optionally having a 2′-O-methyl, 2′-O-MOE, 2′-F, 2′-amino, 2′-O-propyl, 2′-aminopropyl, or 2′-OH modification.

[0191] An oligonucleotide can include one or more bicyclic sugar moieties. A “bicyclic sugar” is a furanosyl ring modified by the bridging of two atoms. A “bicyclic nucleoside” (“BNA”) is a nucleoside having a sugar moiety comprising a bridge connecting two carbon atoms of the sugar ring, thereby forming a bicyclic ring system. In some aspects, the bridge connects the 4′-carbon and the 2′-carbon of the sugar ring. Thus, in some aspects, an oligonucleotide can include one or more locked nucleosides. A locked nucleoside is a nucleoside having a modified ribose moiety in which the ribose moiety comprises an extra bridge connecting the 2′ and 4′ carbons. In other words, a locked nucleoside is a nucleoside comprising a bicyclic sugar moiety comprising a 4′-CH₂—O-2′ bridge. This structure effectively “locks” the ribose in the 3′-endo structural conformation. The addition of locked nucleosides to oligonucleotides has been shown to increase oligonucleotide stability in serum, and to reduce off-target effects (Grunweller, A. et al., (2003) Nucleic Acids Research 31(12):3185-3193). Examples of bicyclic nucleosides for use in the polynucleotides include without limitation nucleosides comprising a bridge between the 4′ and the 2′ ribosyl ring atoms. In some aspects, the polynucleotide agents include one or more bicyclic nucleosides comprising a 4′ to 2′ bridge. Examples of such 4′ to 2′ bridged bicyclic nucleosides, include but are not limited to 4′-(CH₂)—O-2′ (LNA); 4′-(CH₂)—S-2′; 4′-(CH₂)₂-O-2′ (ENA); 4′-CH(CH₃)—O-2′ (also referred to as “constrained ethyl” or “cEt”) and 4′-CH(CH₂OCH₃)—O-2′ (and analogs thereof; see, e.g., U.S. Pat. No. 7,399,845); 4′-C(CH₃)(CH₃)—O-2′ (and analogs thereof, see e.g., U.S. Pat. No. 8,278,283); 4′-CH₂—N(OCH₃)-2′ (and analogs thereof, see e.g., U.S. Pat. No. 8,278,425); 4′-CH₂—O—N(CH₃)₂-2′ (see, e.g., U.S. Patent Publication No. 2004/0171570); 4′-CH₂—N(R)—O-2′, wherein R is H, C₁-C₁₂ alkyl, or a protecting group (see, e.g., U.S. Pat. No. 7,427,672); 4′-CH₂—C(H)(CH₃)-2′ (see, e.g., Chattopadhyaya et al., J. Org. Chem., 2009, 74, 118-134); and 4′-CH₂—C(═CH₂)-2′ (and analogs thereof; see, e.g., U.S. Pat. No. 8,278,426). The entire contents of each of the foregoing are hereby incorporated herein by reference.

[0192] Additional representative U.S. Patents and US Patent Publications that teach the preparation of locked nucleic acid nucleotides include, but are not limited to, the following: U.S. Pat. Nos. 6,268,490; 6,525,191; 6,670,461; 6,770,748; 6,794,499; 6,998,484; 7,053,207; 7,034,133; 7,084,125; 7,399,845; 7,427,672; 7,569,686; 7,741,457; 8,022,193; 8,030,467; 8,278,425; 8,278,426; 8,278,283; US 2008/0039618; and US 2009/0012281, the entire contents of each of which are hereby incorporated herein by reference.

[0193] Any of the foregoing bicyclic nucleosides can be prepared having one or more stereochemical sugar configurations including for example α-L-ribofuranose and j-D-ribofuranose (see WO 99/14226).

[0194] An oligonucleotide can be modified to include one or more constrained ethyl nucleosides. As used herein, a “constrained ethyl nucleoside” or “cEt” is a locked nucleoside comprising a bicyclic sugar moiety comprising a 4′-CH(CH₃)—O-2′ bridge. In one aspect, a constrained ethyl nucleoside is in the S conformation referred to herein as “S-cEt.”

[0195] An oligonucleotide can include one or more “conformationally restricted nucleosides” (“CRN”). CRN are nucleoside analogs with a linker connecting the C2′ and C4′ carbons of ribose or the C3 and —C5′ carbons of ribose. CRN lock the ribose ring into a stable conformation and increase the hybridization affinity to mRNA. The linker is of sufficient length to place the oxygen in an optimal position for stability and affinity resulting in less ribose ring puckering.

[0196] Representative publications that teach the preparation of certain of the above noted CRN include, but are not limited to, US Patent Publication No. 2013/0190383; and PCT publication WO 2013/036868, the entire contents of each of which are hereby incorporated herein by reference.

[0197] In some aspects, an oligonucleotide comprises one or more monomers that are UNA (unlocked nucleoside) nucleosides. UNA is unlocked acyclic nucleoside, wherein any of the bonds of the sugar has been removed, forming an unlocked “sugar” residue. In one example, UNA also encompasses monomer with bonds between C1′-C4′ have been removed (i.e. the covalent carbon-oxygen-carbon bond between the C1′ and C4′ carbons). In another example, the C2′-C3′ bond (i.e. the covalent carbon-carbon bond between the C2′ and C3′ carbons) of the sugar has been removed (see Nuc. Acids Symp. Series, 52, 133-134 (2008) and Fluiter et al., Mol. Biosyst., 2009, 10, 1039 hereby incorporated by reference).

[0198] Representative U.S. publications that teach the preparation of UNA include, but are not limited to, U.S. Pat. No. 8,314,227; and US Patent Publication Nos. 2013/0096289; 2013/0011922; and 2011/0313020, the entire contents of each of which are hereby incorporated herein by reference.

[0199] The ribose molecule can be modified with a cyclopropane ring to produce a tricyclodeoxynucleic acid (tricyclo DNA). The ribose moiety can be substituted for another sugar such as 1,5-anhydrohexitol, threose to produce a threose nucleoside (TNA), or arabinose to produce an arabino nucleoside. The ribose molecule can be replaced with non-sugars such as cyclohexene to produce cyclohexene nucleoside or glycol to produce glycol nucleosides.

[0200] Potentially stabilizing modifications to the ends of nucleoside molecules can include N-(acetylaminocaproyl)-4-hydroxyprolinol (Hyp-C6-NHAc), N-(caproyl-4-hydroxyprolinol (Hyp-C6), N-(acetyl-4-hydroxyprolinol (Hyp-NHAc), thymidine-2′-O-deoxythymidine (ether), N-(aminocaproyl)-4-hydroxyprolinol (Hyp-C6-amino), 2-docosanoyl-uridine-3″-phosphate, inverted base dT(idT) and others. Disclosure of this modification can be found in PCT Publication No. WO 2011/005861.

[0201] Other alternatives chemistries of an oligonucleotide include a 5′ phosphate or 5′ phosphate mimic, e.g., a 5′-terminal phosphate or phosphate mimic of an oligonucleotide. Suitable phosphate mimics are disclosed in, for example US Patent Publication No. 2012/0157511, the entire contents of which are incorporated herein by reference.

[0202] Exemplary oligonucleotides comprise nucleosides with alternative sugar moieties and can comprise DNA or RNA nucleosides. In some aspects, the oligonucleotide comprises nucleosides comprising alternative sugar moieties and DNA nucleosides. Incorporation of alternative nucleosides into the oligonucleotide can enhance the affinity of the oligonucleotide for the target nucleic acid. In that case, the alternative nucleosides can be referred to as affinity enhancing alternative nucleotides.

[0203] In some aspects, the oligonucleotide comprises at least 1 alternative nucleoside, such as at least 2, at least 3, at least 4, at least 5, at least 6, at least 7, at least 8, at least 9, at least 10, at least 11, at least 12, at least 13, at least 14, at least 15 or at least 16 alternative nucleosides. In other aspects, the oligonucleotides comprise from 1 to 10 alternative nucleosides, such as from 2 to 9 alternative nucleosides, such as from 3 to 8 alternative nucleosides, such as from 4 to 7 alternative nucleosides, such as 6 or 7 alternative nucleosides. In an aspect, the oligonucleotide can comprise alternatives, which are independently selected from these three types of alternatives (alternative sugar moiety, alternative nucleobase, and alternative internucleoside linkage), or a combination thereof. In one aspect, the oligonucleotide comprises one or more nucleosides comprising alternative sugar moieties, e.g., 2′ sugar alternative nucleosides. In some aspect, the oligonucleotide comprises the one or more 2′ sugar alternative nucleoside independently selected from the group consisting of 2′-O-alkyl-RNA, 2′-O-methyl-RNA, 2′-alkoxy-RNA, 2′-O-methoxyethyl-RNA, 2′-amino-DNA, 2′-fluoro-DNA, arabino nucleic acid (ANA), 2′-fluoro-ANA, and BNA (e.g., LNA (e.g., A-LNA, 5mC L-NA, G-LNA, T-LNA)) nucleosides. Exemplary structures of the LNAs are as follows (wherein the protecting groups are removed):

[chemical structure]

[0204] In some aspects, the one or more alternative nucleoside is a BNA.

[0205] In some aspects, at least 1 of the alternative nucleosides is a BNA (e.g., an LNA), such as at least 2, such as at least 3, at least 4, at least 5, at least 6, at least 7, or at least 8 of the alternative nucleosides are BNAs. In a still further aspect, all the alternative nucleosides are BNAs.

[0206] In a further aspect, the oligonucleotide comprises at least one alternative internucleoside linkage. In some aspects, the internucleoside linkages within the contiguous nucleotide sequence are phosphorothioate or boronophosphate internucleoside linkages. In some aspects, all the internucleotide linkages in the contiguous sequence of the oligonucleotide are phosphorothioate linkages. In some aspects, the phosphorothioate linkages are stereochemically pure phosphorothioate linkages. In some aspects, the phosphorothioate linkages are Sp phosphorothioate linkages. In other aspects, the phosphorothioate linkages are Rp phosphorothioate linkages.

[0207] In some aspects, the oligonucleotide comprises at least one alternative nucleoside which is a 2′-MOE-RNA, such as 2, 3, 4, 5, 6, 7, 8, 9, or 10 2′-MOE-RNA nucleoside units. In some aspects, the 2′-MOE-RNA nucleoside units are connected by phosphorothioate linkages. In some aspects, at least one of said alternative nucleoside is 2′-fluoro DNA, such as 2, 3, 4, 5, 6, 7, 8, 9, or 10 2′-fluoro-DNA nucleoside units. In some aspects, the oligonucleotide comprises at least one BNA unit and at least one 2′ substituted modified nucleoside. In some aspects, the oligonucleotide comprises both 2′ sugar modified nucleosides and DNA units. In some aspects, the oligonucleotide or contiguous nucleotide region thereof is a gapmer oligonucleotide.

### B. Oligonucleotides Conjugated to Ligands

[0208] Oligonucleotides can be chemically linked to one or more ligands, moieties, or conjugates that enhance the activity, cellular distribution, or cellular uptake of the oligonucleotide. Such moieties include but are not limited to lipid moieties such as a cholesterol moiety (Letsinger et al., (1989) Proc. Natl. Acid. Sci. USA, 86: 6553-6556), cholic acid (Manoharan et al., (1994) Biorg. Med. Chem. Let., 4:1053-1060), a thioether, e.g., beryl-S-tritylthiol (Manoharan et al., (1992) Ann. N.Y. Acad. Sci., 660:306-309; Manoharan et al., (1993) Biorg. Med. Chem. Let., 3:2765-2770), a thiocholesterol (Oberhauser et al., (1992) Nucl. Acids Res., 20:533-538), an aliphatic chain, e.g., dodecandiol or undecyl residues (Saison-Behmoaras et al., (1991) EMBO J, 10:1111-1118; Kabanov et al., (1990) FEBS Lett., 259:327-330; Svinarchuk et al., (1993) Biochimie, 75:49-54), a phospholipid, e.g., di-hexadecyl-rac-glycerol or triethyl-ammonium 1,2-di-O-hexadecyl-rac-glycero-3-phosphonate (Manoharan et al., (1995) Tetrahedron Lett., 36:3651-3654; Shea et al., (1990) Nucl. Acids Res., 18:3777-3783), a polyamine or a polyethylene glycol chain (Manoharan et al., (1995) Nucleosides & Nucleotides, 14:969-973), or adamantane acetic acid (Manoharan et al., (1995) Tetrahedron Lett., 36:3651-3654), a palmityl moiety (Mishra et al., (1995) Biochim. Biophys. Acta, 1264:229-237), or an octadecylamine or hexylamino-carbonyloxycholesterol moiety (Crooke et al., (1996) J. Pharmacol. Exp. Ther., 277:923-937).

[0209] In one aspect, a ligand alters the distribution, targeting, or lifetime of an oligonucleotide agent into which it is incorporated. In some aspects, a ligand provides an enhanced affinity for a selected target, e.g., molecule, cell or cell type, compartment, e.g., a cellular or organ compartment, tissue, organ, or region of the body, as, e.g., compared to a species absent such a ligand.

[0210] Ligands can include a naturally occurring substance, such as a protein (e.g., human serum albumin (HSA), low-density lipoprotein (LDL), or globulin); carbohydrate (e.g., a dextran, pullulan, chitin, chitosan, inulin, cyclodextrin, N-acetylglucosamine, N-acetylgalactosamine, or hyaluronic acid); or a lipid. The ligand can be a recombinant or synthetic molecule, such as a synthetic polymer, e.g., a synthetic polyamino acid. Examples of polyamino acids include polyamino acid is a polylysine (PLL), poly L-aspartic acid, poly L-glutamic acid, styrene-maleic acid anhydride copolymer, poly(L-lactide-co-glycolied) copolymer, divinyl ether-maleic anhydride copolymer, N-(2-hydroxypropyl)methacrylamide copolymer (HMPA), polyethylene glycol (PEG), polyvinyl alcohol (PVA), polyurethane, poly(2-ethylacryllic acid), N-isopropylacrylamide polymers, or polyphosphazine. Example of polyamines include: polyethylenimine, polylysine (PLL), spermine, spermidine, polyamine, pseudopeptide-polyamine, peptidomimetic polyamine, dendrimer polyamine, arginine, amidine, protamine, cationic lipid, cationic porphyrin, quaternary salt of a polyamine, or an alpha helical peptide.

[0211] Ligands can include targeting groups, e.g., a cell or tissue targeting agent, e.g., a lectin, glycoprotein, lipid or protein, e.g., an antibody, that bind to a specified cell type such as a kidney cell. A targeting group can be a thyrotropin, melanotropin, lectin, glycoprotein, surfactant protein A, Mucin carbohydrate, multivalent lactose, multivalent galactose, N-acetyl-galactosamine, N-acetyl-gulucosamine multivalent mannose, multivalent fucose, glycosylated polyaminoacids, multivalent galactose, transferrin, bisphosphonate, polyglutamate, polyaspartate, a lipid, cholesterol, a steroid, bile acid, folate, vitamin B12, vitamin A, biotin, or an RGD peptide or RGD peptide mimetic.

[0212] Other examples of ligands include dyes, intercalating agents (e.g. acridines), cross-linkers (e.g. psoralen, mitomycin C), porphyrins (TPPC4, texaphyrin, Sapphyrin), polycyclic aromatic hydrocarbons (e.g., phenazine, dihydrophenazine), artificial endonucleases (e.g. EDTA), lipophilic molecules, e.g., cholesterol, cholic acid, adamantane acetic acid, 1-pyrene butyric acid, dihydrotestosterone, 1,3-Bis-O(hexadecyl)glycerol, geranyloxyhexyl group, hexadecylglycerol, borneol, menthol, 1,3-propanediol, heptadecyl group, palmitic acid, myristic acid, O3-(oleoyl)lithocholic acid, O3-(oleoyl)cholenic acid, dimethoxytrityl, or phenoxazine) and peptide conjugates (e.g., antennapedia peptide, Tat peptide), alkylating agents, phosphate, amino, mercapto, PEG (e.g., PEG-40K), MPEG, [MPEG]2, polyamino, alkyl, substituted alkyl, radiolabeled markers, enzymes, haptens (e.g. biotin), transport/absorption facilitators (e.g., aspirin, vitamin E, folic acid), synthetic ribonucleases (e.g., imidazole, bisimidazole, histamine, imidazole clusters, acridine-imidazole conjugates, Eu3+ complexes of tetraazamacrocycles), dinitrophenyl, HRP, or AP.

[0213] Ligands can be proteins, e.g., glycoproteins, or peptides, e.g., molecules having a specific affinity for a co-ligand, or antibodies e.g., an antibody, that binds to a specified cell type such as a hepatic cell. Ligands can include hormones and hormone receptors. They can include non-peptidic species, such as lipids, lectins, carbohydrates, vitamins, cofactors, multivalent lactose, multivalent galactose, N-acetyl-galactosamine, N-acetyl-gulucosamine multivalent mannose, or multivalent fucose.

[0214] The ligand can be a substance, e.g., a drug, which can increase the uptake of the oligonucleotide agent into the cell, for example, by disrupting the cell's cytoskeleton, e.g., by disrupting the cell's microtubules, microfilaments, and/or intermediate filaments. The drug can be, for example, taxon, vincristine, vinblastine, cytochalasin, nocodazole, japlakinolide, latrunculin A, phalloidin, swinholide A, indanocine, or myoservin.

[0215] In some aspects, a ligand attached to an oligonucleotide as described herein acts as a pharmacokinetic modulator (PK modulator). PK modulators include lipophiles, bile acids, steroids, phospholipid analogues, peptides, protein binding agents, PEG, vitamins etc. Exemplary PK modulators include, but are not limited to, cholesterol, fatty acids, cholic acid, lithocholic acid, dialkylglycerides, diacylglyceride, phospholipids, sphingolipids, naproxen, ibuprofen, vitamin E, biotin etc. Oligonucleotides that comprise a number of phosphorothioate linkages are also known to bind to serum protein, thus short oligonucleotides, e.g., oligonucleotides of about 5 bases, 10 bases, 15 bases, or 20 bases, comprising multiple of phosphorothioate linkages in the backbone are also amenable as ligands (e.g. as PK modulating ligands). In addition, aptamers that bind serum components (e.g. serum proteins) are also suitable for use as PK modulating ligands in the aspects described herein.

[0216] Ligand-conjugated oligonucleotides can be synthesized by the use of an oligonucleotide that bears a pendant reactive functionality, such as that derived from the attachment of a linking molecule onto the oligonucleotide (described below). This reactive oligonucleotide can be reacted directly with commercially-available ligands, ligands that are synthesized bearing any of a variety of protecting groups, or ligands that have a linking moiety attached thereto.

[0217] The oligonucleotides used in the conjugates can be conveniently and routinely made through the well-known technique of solid-phase synthesis. Equipment for such synthesis is sold by several vendors including, for example, Applied Biosystems (Foster City, Calif.). Any other means for such synthesis known in the art can additionally or alternatively be employed. It is also known to use similar techniques to prepare other oligonucleotides, such as the phosphorothioates and alkylated derivatives.

[0218] In the ligand-conjugated oligonucleotides, such as the ligand-molecule bearing sequence-specific linked nucleosides, the oligonucleotides and oligonucleosides can be assembled on a suitable DNA synthesizer utilizing standard nucleotide or nucleoside precursors, or nucleotide or nucleoside conjugate precursors that already bear the linking moiety, ligand-nucleotide or nucleoside-conjugate precursors that already bear the ligand molecule, or non-nucleoside ligand-bearing building blocks.

[0219] When using conjugate precursors that already bear a linking moiety, the synthesis of the sequence-specific linked nucleosides is typically completed, and the ligand molecule is then reacted with the linking moiety to form the ligand-conjugated oligonucleotide. In some aspects, the oligonucleotides or linked nucleosides are synthesized by an automated synthesizer using phosphoramidites derived from ligand-nucleoside conjugates in addition to the standard phosphoramidites and non-standard phosphoramidites that are commercially available and routinely used in oligonucleotide synthesis.

i. Lipid Conjugates

[0220] In one aspect, the ligand or conjugate is a lipid or lipid-based molecule. Such a lipid or lipid-based molecule can bind a serum protein, e.g., human serum albumin (HSA). An HSA binding ligand allows for distribution of the conjugate to a target tissue, e.g., a non-kidney target tissue of the body. A lipid or lipid-based ligand can (a) increase resistance to degradation of the conjugate, (b) increase targeting or transport into a target cell or cell membrane, and/or (c) be used to adjust binding to a serum protein, e.g., HSA.

[0221] In another aspect, the ligand is a moiety, e.g., a vitamin, which is taken up by a target cell, e.g., a proliferating cell. Exemplary vitamins include vitamin A, E, and K.

ii. Cell Permeation Agents

[0222] In another aspect, the ligand is a cell-permeation agent, such as a helical cell-permeation agent. In one aspect, the agent is amphipathic. An exemplary agent is a peptide such as tat or antennopedia. If the agent is a peptide, it can be modified, including a peptidylmimetic, invertomers, non-peptide or pseudo-peptide linkages, and use of D-amino acids. In one aspect, the helical agent is an alpha-helical agent, which can havea lipophilic and a lipophobic phase.

[0223] The ligand can be a peptide or peptidomimetic. A peptidomimetic (also referred to herein as an oligopeptidomimetic) is a molecule capable of folding into a defined three-dimensional structure similar to a natural peptide. The attachment of peptide and peptidomimetics to oligonucleotide agents can affect pharmacokinetic distribution of the oligonucleotide, such as by enhancing cellular recognition and absorption. The peptide or peptidomimetic moiety can be about 5-50 amino acids long, e.g., about 5, 10, 15, 20, 25, 30, 35, 40, 45, or 50 amino acids long.

[0224] A peptide or peptidomimetic can be, for example, a cell permeation peptide, cationic peptide, amphipathic peptide, or hydrophobic peptide (e.g., consisting primarily of Tyr, Trp, or Phe). The peptide moiety can be a dendrimer peptide, constrained peptide or crosslinked peptide. In another alternative, the peptide moiety can include a hydrophobic membrane translocation sequence (MTS). An exemplary hydrophobic MTS-containing peptide is RFGF having the amino acid sequence AAVALLPAVLLALLAP. An RFGF analogue (e.g., amino acid sequence AALLPVLLAAP containing a hydrophobic MTS can be a targeting moiety. The peptide moiety can be a “delivery” peptide, which can carry large polar molecules including peptides, oligonucleotides, and protein across cell membranes. For example, sequences from the HIV Tat protein (GRKKRRQRRRPPQ and the Drosophila Antennapedia protein (RQIKIWFQNRRMKWKK have been found to be capable of functioning as delivery peptides. A peptide or peptidomimetic can be encoded by a random sequence of DNA, such as a peptide identified from a phage-display library, or one-bead-one-compound (OBOC) combinatorial library (Lam et al., Nature, 354:82-84, 1991). Examples of a peptide or peptidomimetic tethered to an oligonucleotide agent via an incorporated monomer unit for cell targeting purposes is an arginine-glycine-aspartic acid (RGD)-peptide, or RGD mimic. A peptide moiety can range in length from about 5 amino acids to about 40 amino acids. The peptide moieties can have a structural modification, such as to increase stability or direct conformational properties. Any of the structural modifications described below can be utilized.

[0225] An RGD peptide for use in the compositions and methods can be linear or cyclic, and can be modified, e.g., glycosylated or methylated, to facilitate targeting to a specific tissue(s). RGD-containing peptides and peptidiomimemtics can include D-amino acids, as well as synthetic RGD mimics. In addition to RGD, one can use other moieties that target the integrin ligand. Some conjugates of this ligand target PECAM-1 or VEGF.

[0226] A cell permeation peptide is capable of permeating a cell, e.g., a microbial cell, such as a bacterial or fungal cell, or a mammalian cell, such as a human cell. A microbial cell-permeating peptide can be, for example, an α-helical linear peptide (e.g., LL-37 or Ceropin P1), a disulfide bond-containing peptide (e.g., α-defensin, β-defensin, or bactenecin), or a peptide containing only one or two dominating amino acids (e.g., PR-39 or indolicidin). A cell permeation peptide can include a nuclear localization signal (NLS). For example, a cell permeation peptide can be a bipartite amphipathic peptide, such as MPG, which is derived from the fusion peptide domain of HIV-1 gp41 and the NLS of SV40 large T antigen (Simeoni et al., Nucl. Acids Res. 31:2717-2724, 2003).

iii. Carbohydrate Conjugates

[0227] In some aspects of the compositions and methods described herein, an oligonucleotide further comprises a carbohydrate. The carbohydrate conjugated oligonucleotides are advantageous for the in vivo delivery of nucleic acids, as well as compositions suitable for in vivo therapeutic use, as described herein. As used herein, “carbohydrate” refers to a compound which is either a carbohydrate per se made up of one or more monosaccharide units having at least 6 carbon atoms (which can be linear, branched or cyclic) with an oxygen, nitrogen or sulfur atom bonded to each carbon atom; or a compound having as a part thereof a carbohydrate moiety made up of one or more monosaccharide units each having at least six carbon atoms (which can be linear, branched or cyclic), with an oxygen, nitrogen or sulfur atom bonded to each carbon atom. Representative carbohydrates include the sugars (mono-, di-, tri- and oligosaccharides containing from about 4, 5, 6, 7, 8, or 9 monosaccharide units), and polysaccharides such as starches, glycogen, cellulose and polysaccharide gums. Specific monosaccharides include C5 and above (e.g., C5, C6, C7, or C8) sugars; di- and trisaccharides include sugars having two or three monosaccharide units (e.g., C5, C6, C7, or C8).

[0228] In one aspect, a carbohydrate conjugate for use in the compositions and methods described herein is a monosaccharide.

[0229] In some aspects, the carbohydrate conjugate further comprises one or more additional ligands as described above, such as, but not limited to, a PK modulator and/or a cell permeation peptide.

[0230] Additional carbohydrate conjugates (and linkers) suitable for use include those described in PCT Publication Nos. WO 2014/179620 and WO 2014/179627, the entire contents of each of which are incorporated herein by reference.

iv. Linkers

[0231] In some aspects, the conjugate or ligand described herein can be attached to an oligonucleotide with various linkers that can be cleavable or non-cleavable.

[0232] Linkers typically comprise a direct bond or an atom such as oxygen or sulfur, a unit such as NR⁸, C(O), C(O)NH, SO, SO₂, SO₂NH or a chain of atoms, such as, but not limited to, substituted or unsubstituted alkyl, substituted or unsubstituted alkenyl, substituted or unsubstituted alkynyl, arylalkyl, arylalkenyl, arylalkynyl, heteroarylalkyl, heteroarylalkenyl, heteroarylalkynyl, heterocyclylalkyl, heterocyclylalkenyl, heterocyclylalkynyl, aryl, heteroaryl, heterocyclyl, cycloalkyl, cycloalkenyl, alkylarylalkyl, alkylarylalkenyl, alkylarylalkynyl, alkenylarylalkyl, alkenylarylalkenyl, alkenylarylalkynyl, alkynylarylalkyl, alkynylarylalkenyl, alkynylarylalkynyl, alkylheteroarylalkyl, alkylheteroarylalkenyl, alkylheteroarylalkynyl, alkenylheteroarylalkyl, alkenylheteroarylalkenyl, alkenylheteroarylalkynyl, alkynylheteroarylalkyl, alkynylheteroarylalkenyl, alkynylheteroarylalkynyl, alkylheterocyclylalkyl, alkylheterocyclylalkenyl, alkylhererocyclylalkynyl, alkenylheterocyclylalkyl, alkenylheterocyclylalkenyl, alkenylheterocyclylalkynyl, alkynylheterocyclylalkyl, alkynylheterocyclylalkenyl, alkynylheterocyclylalkynyl, alkylaryl, alkenylaryl, alkynylaryl, alkylheteroaryl, alkenylheteroaryl, alkynylhereroaryl, which one or more methylenes can be interrupted or terminated by O, S, S(O), SO₂, N(R⁸), C(O), substituted or unsubstituted aryl, substituted or unsubstituted heteroaryl, substituted or unsubstituted heterocyclic; where R⁸ is hydrogen, acyl, aliphatic or substituted aliphatic. In one aspect, the linker is between about 1-24, 2-24, 3-24, 4-24, 5-24, 6-24, 6-18, 7-18, 8-18, 7-17, 8-17, 6-16, 7-17, 8-16 or 1,2,3,4, 5,6,7, 8,9, 10, 11, 12, 13, 14, 15, 16, 17, 18, 19, 20, 21, 21, 22, 23, or 24 atoms.

[0233] A cleavable linking group is one which is sufficiently stable outside the cell, but which upon entry into a target cell is cleaved to release the two parts the linker is holding together. In somes aspects, the cleavable linking group is cleaved at least 10 times, 20 times, 30 times, 40 times, 50 times, 60 times, 70 times, 80 times, 90 times, or more, or at least 100 times faster in a target cell or under a first reference condition (which can, e.g., be selected to mimic or represent intracellular conditions) than in the blood of a subject, or under a second reference condition (which can, e.g., be selected to mimic or represent conditions found in the blood or serum).

[0234] Cleavable linking groups are susceptible to cleavage agents, e.g., pH, redox potential, or the presence of degradative molecules. Generally, cleavage agents are more prevalent or found at higher levels or activities inside cells than in serum or blood. Examples of such degradative agents include: redox agents which are selective for particular substrates or which have no substrate specificity, including, e.g., oxidative or reductive enzymes or reductive agents such as mercaptans, present in cells, that can degrade a redox cleavable linking group by reduction; esterases; endosomes or agents that can create an acidic environment, e.g., those that result in a pH of five or lower; enzymes that can hydrolyze or degrade an acid cleavable linking group by acting as a general acid, peptidases (which can be substrate specific), and phosphatases.

[0235] A cleavable linkage group, such as a disulfide bond can be susceptible to pH. The pH of human serum is 7.4, while the average intracellular pH is slightly lower, ranging from about 7.1-7.3. Endosomes have a more acidic pH, in the range of 5.5-6.0, and lysosomes have an even more acidic pH at around 5.0. Some linkers will have a cleavable linking group that is cleaved at a preferred pH, thereby releasing a cationic lipid from the ligand inside the cell, or into the desired compartment of the cell.

[0236] A linker can include a cleavable linking group that is cleavable by a particular enzyme. The type of cleavable linking group incorporated into a linker can depend on the cell to be targeted. For example, a liver-targeting ligand can be linked to a cationic lipid through a linker that includes an ester group. Liver cells are rich in esterases, and therefore the linker will be cleaved more efficiently in liver cells than in cell types that are not esterase-rich. Other cell-types rich in esterases include cells of the lung, renal cortex, and testis.

[0237] Linkers that contain peptide bonds can be used when targeting cell types rich in peptidases, such as liver cells and synoviocytes.

[0238] In general, the suitability of a candidate cleavable linking group can be evaluated by testing the ability of a degradative agent (or condition) to cleave the candidate linking group. It will also be desirable to test the candidate cleavable linking group for the ability to resist cleavage in the blood or when in contact with other non-target tissue. Thus, one can determine the relative susceptibility to cleavage between at least two conditions, where at least one condition is selected to be indicative of cleavage in a target cell and another condition is selected to be indicative of cleavage in other tissues or biological fluids, e.g., blood or serum. The evaluations can be carried out in cell free systems, in cells, in cell culture, in organ or tissue culture, or in whole animals. It can be useful to make initial evaluations in cell-free or culture conditions and to confirm by further evaluations in whole animals. In some aspects, useful candidate compounds are cleaved at least 2, 4, 10, 20, 30, 40, 50, 60, 70, 80, 90, or 100 times faster in the cell (or under in vitro conditions selected to mimic intracellular conditions) as compared to blood or serum (or under in vitro conditions selected to mimic extracellular conditions).

a. Redox Cleavable Linking Groups

[0239] In one aspect, a cleavable linking group is a redox cleavable linking group that is cleaved upon reduction or oxidation. An example of reductively cleavable linking group is a disulphide linking group (—S—S—). To determine if a candidate cleavable linking group is a suitable “reductively cleavable linking group,” or for example is suitable for use with a particular oligonucleotide moiety and particular targeting agent one can look to methods described herein. For example, a candidate can be evaluated by incubation with dithiothreitol (DTT), or other reducing agent using reagents know in the art, which mimic the rate of cleavage which would be observed in a cell, e.g., a target cell. The candidates can be evaluated under conditions which are selected to mimic blood or serum conditions. In one aspect, candidate compounds are cleaved by at most about 10% in the blood. In other aspects, useful candidate compounds are degraded at least 2, 4, 10, 20, 30, 40, 50, 60, 70, 80, 90, or 100 times faster in the cell (or under in vitro conditions selected to mimic intracellular conditions) as compared to blood (or under in vitro conditions selected to mimic extracellular conditions). The rate of cleavage of candidate compounds can be determined using standard enzyme kinetics assays under conditions chosen to mimic intracellular media and compared to conditions chosen to mimic extracellular media.

b. Phosphate-Based Cleavable Linking Groups

[0240] In another aspect, a cleavable linker comprises a phosphate-based cleavable linking group. A phosphate-based cleavable linking group is cleaved by agents that degrade or hydrolyze the phosphate group. An example of an agent that cleaves phosphate groups in cells are enzymes such as phosphatases in cells. Examples of phosphate-based linking groups are —O—P(O)(OR^{k})—O—, —O—P(S)(OR^{k})—O—, —O—P(S)(SR^{k})—O—, —S—P(O)(OR^{k})—O—, —O—P(O)(OR^{k})—S—, —S—P(O)(OR^{k})—S—, —O—P(S)(OR^{k})—S—, —S—P(S)(OR^{k})—O—, —O—P(O)(R^{k})—O—, —O—P(S)(R^{k})—O—, —S—P(O)(R′)—O—, —S—P(S)(R^{k})—O—, —S—P(O)(R^{k})—S—, —O—P(S)(R^{k})—S—. These candidates can be evaluated using methods analogous to those described above.

c. Acid Cleavable Linking Groups

[0241] In another aspect, a cleavable linker comprises an acid cleavable linking group. An acid cleavable linking group is a linking group that is cleaved under acidic conditions. In some aspects, acid cleavable linking groups are cleaved in an acidic environment with a pH of about 6.5 or lower (e.g., about 6.0, 5.75, 5.5, 5.25, 5.0, or lower), or by agents such as enzymes that can act as a general acid. In a cell, specific low pH organelles, such as endosomes and lysosomes can provide a cleaving environment for acid cleavable linking groups. Examples of acid cleavable linking groups include but are not limited to hydrazones, esters, and esters of amino acids. Acid cleavable groups can have the general formula —C═NN—, C(O)O, or —OC(O). In one aspect, the carbon is attached to the oxygen of the ester (the alkoxy group) is an aryl group, substituted alkyl group, or tertiary alkyl group such as dimethyl pentyl or t-butyl. These candidates can be evaluated using methods analogous to those described above.

d. Ester-Based Linking Groups

[0242] In another aspect, a cleavable linker comprises an ester-based cleavable linking group. An ester-based cleavable linking group is cleaved by enzymes such as esterases and amidases in cells. Examples of ester-based cleavable linking groups include but are not limited to esters of alkylene, alkenylene and alkynylene groups. Ester cleavable linking groups have the general formula —C(O)O—, or —OC(O)—. These candidates can be evaluated using methods analogous to those described above.

e. Peptide-Based Cleaving Groups

[0243] In yet another aspect, a cleavable linker comprises a peptide-based cleavable linking group. A peptide-based cleavable linking group is cleaved by enzymes such as peptidases and proteases in cells. Peptide-based cleavable linking groups are peptide bonds formed between amino acids to yield oligopeptides (e.g., dipeptides, tripeptides etc.) and polypeptides. Peptide-based cleavable groups do not include the amide group (—C(O)NH—). The amide group can be formed between any alkylene, alkenylene, or alkynelene. A peptide bond is a special type of amide bond formed between amino acids to yield peptides and proteins. The peptide based cleavage group is generally limited to the peptide bond (i.e., the amide bond) formed between amino acids yielding peptides and proteins and does not include the entire amide functional group. Peptide-based cleavable linking groups have the general formula —NHCHR^{A}C(O)NHCHR^{B}C(O)—, where R^{A} and RB are the R groups of the two adjacent amino acids. These candidates can be evaluated using methods analogous to those described above.

[0244] In one aspect, an oligonucleotide is conjugated to a carbohydrate through a linker. Linkers include bivalent and trivalent branched linker groups. Linkers for oligonucleotide carbohydrate conjugates include, but are not limited to, those described in formulas 24-35 of PCT Publication No. WO 2018/195165.

[0245] Representative U.S. patents that teach the preparation of oligonucleotide conjugates include, but are not limited to, U.S. Pat. Nos. 4,828,979; 4,948,882; 5,218,105; 5,525,465; 5,541,313; 5,545,730; 5,552,538; 5,578,717, 5,580,731; 5,591,584; 5,109,124; 5,118,802; 5,138,045; 5,414,077; 5,486,603; 5,512,439; 5,578,718; 5,608,046; 4,587,044; 4,605,735; 4,667,025; 4,762,779; 4,789,737; 4,824,941; 4,835,263; 4,876,335; 4,904,582; 4,958,013; 5,082,830; 5,112,963; 5,214,136; 5,082,830; 5,112,963; 5,214,136; 5,245,022; 5,254,469; 5,258,506; 5,262,536; 5,272,250; 5,292,873; 5,317,098; 5,371,241, 5,391,723; 5,416,203, 5,451,463; 5,510,475; 5,512,667; 5,514,785; 5,565,552; 5,567,810; 5,574,142; 5,585,481; 5,587,371; 5,595,726; 5,597,696; 5,599,923; 5,599,928 and 5,688,941; 6,294,664; 6,320,017; 6,576,752; 6,783,931; 6,900,297; 7,037,646; 8,106,022, the entire contents of each of which are hereby incorporated herein by reference.

[0246] It is not necessary for all positions in a given compound to be uniformly modified, and in fact more than one of the aforementioned modifications can be incorporated in a single compound or even at a single nucleoside within an oligonucleotide. Oligonucleotide compounds that are chimeric compounds are also contemplated. Chimeric oligonucleotides typically contain at least one region wherein the RNA is modified so as to confer upon the oligonucleotide increased resistance to nuclease degradation, increased cellular uptake, and/or increased binding affinity for the target nucleic acid. An additional region of the oligonucleotide can serve as a substrate for enzymes capable of cleaving RNA:DNA. By way of example, RNase H is a cellular endonuclease which cleaves the RNA strand of an RNA:DNA duplex. Activation of RNase H, therefore, results in cleavage of the RNA target, thereby greatly enhancing the efficiency of oligonucleotide inhibition of gene expression. Consequently, comparable results can often be obtained with shorter oligonucleotides when chimeric oligonucleotides are used, compared to phosphorothioate deoxy oligonucleotides hybridizing to the same target region. Cleavage of the RNA target can be routinely detected by gel electrophoresis and, if necessary, associated nucleic acid hybridization techniques known in the art.

[0247] In certain instances, the nucleotides of an oligonucleotide can be modified by a non-ligand group. A number of non-ligand molecules have been conjugated to oligonucleotides in order to enhance the activity, cellular distribution, or cellular uptake of the oligonucleotide, and procedures for performing such conjugations are available in the scientific literature. Such non-ligand moieties have included lipid moieties, such as cholesterol (Kubo, T. et al., Biochem. Biophys. Res. Comm, 2007, 365(1):54-61; Letsinger et al., Proc. Natl. Acad. Sci. USA, 1989, 86:6553), cholic acid (Manoharan et al., Bioorg. Med. Chem. Lett., 1994, 4:1053), a thioether, e.g., hexyl-S-tritylthiol (Manoharan et al., Ann. N.Y. Acad. Sci., 1992, 660:306; Manoharan et al., Bioorg. Med. Chem. Let., 1993, 3:2765), a thiocholesterol (Oberhauser et al., Nucl. Acids Res., 1992, 20:533), an aliphatic chain, e.g., dodecandiol or undecyl residues (Saison-Behmoaras et al., EMBO J., 1991, 10:111; Kabanov et al., FEBS Lett., 1990, 259:327; Svinarchuk et al., Biochimie, 1993, 75:49), a phospholipid, e.g., di-hexadecyl-rac-glycerol or triethylammonium 1,2-di-O-hexadecyl-rac-glycero-3-H-phosphonate (Manoharan et al., Tetrahedron Lett., 1995, 36:3651; Shea et al., Nucl. Acids Res., 1990, 18:3777), a polyamine or a polyethylene glycol chain (Manoharan et al., Nucleosides & Nucleotides, 1995, 14:969), or adamantane acetic acid (Manoharan et al., Tetrahedron Lett., 1995, 36:3651), a palmityl moiety (Mishra et al., Biochim. Biophys. Acta, 1995, 1264:229), or an octadecylamine or hexylamino-carbonyl-oxycholesterol moiety (Crooke et al., J. Pharmacol. Exp. Ther., 1996, 277:923). Representative United States patents that teach the preparation of such oligonucleotide conjugates have been listed above. Typical conjugation protocols involve the synthesis of an oligonucleotide bearing an aminolinker at one or more positions of the sequence. The amino group is then reacted with the molecule being conjugated using appropriate coupling or activating reagents. The conjugation reaction can be performed either with the oligonucleotide still bound to the solid support or following cleavage of the oligonucleotide, in solution phase. Purification of the oligonucleotide conjugate by HPLC typically affords the pure conjugate.

### IV. Pharmaceutical Uses

[0248] The oligonucleotide, or pharmaceutically acceptable salt thereof, compositions described herein are useful in the methods described herein, and, while not bound by theory, are believed to exert their desirable effects through their ability to modulate the level, status, and/or activity of a MutSP heterodimer comprising MSH3, e.g., by inhibiting the activity or level of the MSH3 protein in a cell in a mammal.

[0249] An aspect relates to methods of treating disorders related to DNA mismatch repair such as nucleotide repeat expansion disorders (e.g., trinucleotide repeat expansion disorders) in a subject in need thereof. Another aspect includes reducing the level of MSH3 in a cell of a subject identified as having a nucleotide repeat expansion disorder (e.g., a trinucleotide repeat expansion disorder). Still another aspect includes a method of inhibiting expression of MSH3 in a cell in a subject. Further aspects include methods of decreasing nucleotide repeat expansion in a cell. The methods include contacting a cell with an oligonucleotide, or pharmaceutically acceptable salt thereof, in an amount effective to inhibit expression of MSH3 in the cell, thereby inhibiting expression of MSH3 in the cell.

[0250] Based on the above methods, an oligonucleotide, or pharmaceutically acceptable salt thereof, or a composition comprising such an oligonucleotide, or pharmaceutically acceptable salt thereof, for use in therapy, or for use as a medicament, or for use in treating disorders related to DNA mismatch repair such as repeat expansion disorders in a subject in need thereof, or for use in reducing the level of MSH3 in a cell of a subject identified as having a nucleotide repeat expansion disorder (e.g., a trinucleotide repeat expansion disorder), or for use in inhibiting expression of MSH3 in a cell in a subject, or for use in decreasing nucleotide repeat expansion (e.g., trinucleotide repeat expansion) in a cell is contemplated. The uses include the contacting of a cell with the oligonucleotide, or pharmaceutically acceptable salt thereof, in an amount effective to inhibit expression of MSH3 in the cell, thereby inhibiting expression of MSH3 in the cell. Aspects described below in relation to the methods described herein are also applicable to these further aspects.

[0251] Contacting of a cell with an oligonucleotide, or pharmaceutically acceptable salt thereof, can be done in vitro or in vivo. Contacting a cell in vivo with the oligonucleotide, or pharmaceutically acceptable salt thereof, includes contacting a cell or group of cells within a subject, e.g., a human subject, with the oligonucleotide, or pharmaceutically acceptable salt thereof. Combinations of in vitro and in vivo methods of contacting a cell are also possible. Contacting a cell can be direct or indirect, as discussed above. Furthermore, contacting a cell can be accomplished via a targeting ligand, including any ligand described herein or known in the art. In some aspects, the targeting ligand is a carbohydrate moiety, e.g., a GalNAc3 ligand, or any other ligand that directs the oligonucleotide to a site of interest. Cells can include those of the central nervous system, or muscle cells.

[0252] Inhibiting expression of a MSH3 gene includes any level of inhibition of a MSH3 gene, e.g., at least partial suppression of the expression of a MSH3 gene, such as an inhibition by at least 20%. In some aspects, inhibition is by at least 25%, at least 30%, at least 35%, at least 40%, at least 45%, at least 50%, at least 55%, at least 60%, at least 65%, at least 70%, at least 75%, at least 80%, at least 85%, at least 90%, at least 91%, at least 92%, at least 93%, at least 94%, at least 95%, at least 96%, at least 97%, at least 98%, or at least 99%.

[0253] The expression of a MSH3 gene can be assessed based on the level of any variable associated with MSH3 gene expression, e.g., MSH3 mRNA level or MSH3 protein level.

[0254] Inhibition can be assessed by a decrease in an absolute or relative level of one or more of these variables compared with a control level. The control level can be any type of control level that is utilized in the art, e.g., a pre-dose baseline level, or a level determined from a similar subject, cell, or sample that is untreated or treated with a control (such as, e.g., buffer only control or inactive agent control).

[0255] In some aspects, surrogate markers can be used to detect inhibition of MSH3. For example, effective treatment of a nucleotide repeat expansion disorder (e.g., a trinucleotide repeat expansion disorder), as demonstrated by acceptable diagnostic and monitoring criteria with an agent to reduce MSH3 expression can be understood to demonstrate a clinically relevant reduction in MSH3.

[0256] In some aspects of the methods, expression of a MSH3 gene is inhibited by at least 20%, 25%, 30%, 35%, 40%, 45%, 50%, 55%, 60%, 65%, 70%, 75%, 80%, 85%, 90%, or 95%, or to below the level of detection of the assay. In some aspects, the methods include a clinically relevant inhibition of expression of MSH3, e.g., as demonstrated by a clinically relevant outcome after treatment of a subject with an agent to reduce the expression of MSH3.

[0257] Inhibition of the expression of a MSH3 gene can be manifested by a reduction of the amount of mRNA expressed by a first cell or group of cells (such cells can be present, for example, in a sample derived from a subject) in which a MSH3 gene is transcribed and which has or have been treated (e.g., by contacting the cell or cells with an oligonucleotide, or pharmaceutically acceptable salt thereof, or by administering an oligonucleotide, or pharmaceutically acceptable salt thereof, to a subject in which the cells are or were present) such that the expression of a MSH3 gene is inhibited, as compared to a second cell or group of cells substantially identical to the first cell or group of cells but which has not or have not been so treated (control cell(s) not treated with an oligonucleotide, or pharmaceutically acceptable salt thereof, or not treated with an oligonucleotide, or pharmaceutically acceptable salt thereof, targeted to the gene of interest). The degree of inhibition can be expressed in terms of:

$$\frac{( mRNA in control cells ) - ( mRNA in treated cells )}{( mRNA in control cells )} \times 100 \%$$

[0258] In other aspects, inhibition of the expression of a MSH3 gene can be assessed in terms of a reduction of a parameter that is functionally linked to MSH3 gene expression, e.g., MSH3 protein expression or MSH3 signaling pathways. MSH3 gene silencing can be determined in any cell expressing MSH3, either endogenous or heterologous from an expression construct, and by any assay known in the art.

[0259] Inhibition of the expression of a MSH3 protein can be manifested by a reduction in the level of the MSH3 protein that is expressed by a cell or group of cells (e.g., the level of protein expressed in a sample derived from a subject). As explained above, for the assessment of mRNA suppression, the inhibition of protein expression levels in a treated cell or group of cells can similarly be expressed as a percentage of the level of protein in a control cell or group of cells.

[0260] A control cell or group of cells that can be used to assess the inhibition of the expression of a MSH3 gene includes a cell or group of cells that has not yet been contacted with an oligonucleotide. For example, the control cell or group of cells can be derived from an individual subject (e.g., a human or animal subject) prior to treatment of the subject with an oligonucleotide.

[0261] The level of MSH3 mRNA that is expressed by a cell or group of cells can be determined using any method known in the art for assessing mRNA expression. In one aspect, the level of expression of MSH3 in a sample is determined by detecting a transcribed polynucleotide, or portion thereof, e.g., mRNA of the MSH3 gene. RNA can be extracted from cells using RNA extraction techniques including, for example, using acid phenol/guanidine isothiocyanate extraction (RNAzol B; Biogenesis), RNEASY™ RNA preparation kits (Qiagen) or PAXgene (PreAnalytix, Switzerland). Typical assay formats utilizing ribonucleic acid hybridization include nuclear run-on assays, RT-PCR, RNase protection assays, northern blotting, in situ hybridization, and microarray analysis. Circulating MSH3 mRNA can be detected using methods the described in PCT Publication WO2012/177906, the entire contents of which are hereby incorporated herein by reference. In some aspects, the level of expression of MSH3 is determined using a nucleic acid probe. The term “probe,” as used herein, refers to any molecule that is capable of selectively binding to a specific MSH3 sequence, e.g. to an mRNA or polypeptide. Probes can be synthesized by one of skill in the art, or derived from appropriate biological preparations. Probes can be specifically designed to be labeled. Examples of molecules that can be utilized as probes include, but are not limited to, RNA, DNA, proteins, antibodies, and organic molecules.

[0262] Isolated mRNA can be used in hybridization or amplification assays that include, but are not limited to, Southern or northern analyses, polymerase chain reaction (PCR) analyses, and probe arrays. One method for the determination of mRNA levels involves contacting the isolated mRNA with a nucleic acid molecule (probe) that can hybridize to MSH3 mRNA. In one aspect, the mRNA is immobilized on a solid surface and contacted with a probe, for example by running the isolated mRNA on an agarose gel and transferring the mRNA from the gel to a membrane, such as nitrocellulose. In an alternative aspect, the probe(s) are immobilized on a solid surface and the mRNA is contacted with the probe(s), for example, in an AFFYMETRIX gene chip array. A skilled artisan can readily adapt known mRNA detection methods for use in determining the level of MSH3 mRNA.

[0263] An alternative method for determining the level of expression of MSH3 in a sample involves the process of nucleic acid amplification and/or reverse transcriptase (to prepare cDNA) of for example mRNA in the sample, e.g., by RT-PCR (the experimental aspect set forth in Mullis, 1987, U.S. Pat. No. 4,683,202), ligase chain reaction (Barany (1991) Proc. Natl. Acad. Sci. USA 88:189-193), self-sustained sequence replication (Guatelli et al. (1990) Proc. Natl. Acad. Sci. USA 87:1874-1878), transcriptional amplification system (Kwoh et al. (1989) Proc. Natl. Acad. Sci. USA 86:1173-1177), Q-Beta Replicase (Lizardi et al. (1988) Bio/Technology 6:1197), rolling circle replication (Lizardi et al., U.S. Pat. No. 5,854,033) or any other nucleic acid amplification method, followed by the detection of the amplified molecules using techniques well known to those of skill in the art. These detection schemes are especially useful for the detection of nucleic acid molecules if such molecules are present in very low numbers. In some aspects, the level of expression of MSH3 is determined by quantitative fluorogenic RT-PCR (i.e., the TAQMANm System) or the DUAL-GLO® Luciferase assay.

[0264] The expression levels of MSH3 mRNA can be monitored using a membrane blot (such as used in hybridization analysis such as northern, Southern, dot, and the like), or microwells, sample tubes, gels, beads or fibers (or any solid support comprising bound nucleic acids). See U.S. Pat. Nos. 5,770,722; 5,874,219; 5,744,305; 5,677,195; and 5,445,934, which are incorporated herein by reference. The determination of MSH3 expression level can comprise using nucleic acid probes in solution.

[0265] In some aspects, the level of mRNA expression is assessed using branched DNA (bDNA) assays or real time PCR (qPCR). The use of this PCR method is described and exemplified in the Examples presented herein. Such methods can be used for the detection of MSH3 nucleic acids.

[0266] The level of MSH3 protein expression can be determined using any method known in the art for the measurement of protein levels. Such methods include, for example, electrophoresis, capillary electrophoresis, high performance liquid chromatography (HPLC), thin layer chromatography (TLC), hyperdiffusion chromatography, fluid or gel precipitin reactions, absorption spectroscopy, a colorimetric assays, spectrophotometric assays, flow cytometry, immunodiffusion (single or double), immunoelectrophoresis, western blotting, radioimmunoassay (RIA), enzyme-linked immunosorbent assays (ELISAs), immunofluorescent assays, electrochemiluminescence assays, and the like. Such assays can be used for the detection of proteins indicative of the presence or replication of MSH3 proteins.

[0267] In some aspects of the methods described herein, the oligonucleotide, or pharmaceutically acceptable salt thereof, is administered to a subject such that the oligonucleotide, or pharmaceutically acceptable salt thereof, is delivered to a specific site within the subject. The inhibition of expression of MSH3 can be assessed using measurements of the level or change in the level of MSH3 mRNA or MSH3 protein in a sample derived from a specific site within the subject. In some aspects, the methods include a clinically relevant inhibition of expression of MSH3, e.g., as demonstrated by a clinically relevant outcome after treatment of a subject with an agent to reduce the expression of MSH3.

[0268] In other aspects, the oligonucleotide, or pharmaceutically acceptable salt thereof, is administered in an amount and for a time effective to result in one of (or more, e.g., two or more, three or more, four or more of): (a) decrease the number of repeats, (b) decrease the level of polyglutamine, (c) decreased cell death (e.g., CNS cell death and/or muscle cell death), (d) delayed onset of the disorder, (e) increased survival of subject, and (f) increased progression free survival of a subject.

[0269] Treating nucleotide repeat expansion disorders (e.g., trinucleotide repeat expansion disorders) can result in an increase in average survival time of an individual or a population of subjects treated with an oligonucleotide, or pharmaceutically acceptable salt thereof, described herein in comparison to a population of untreated subjects. For example, the survival time of an individual or average survival time of a population is increased by more than 30 days (more than 60 days, 90 days, or 120 days). An increase in survival time of an individual or in average survival time of a population can be measured by any reproducible means. An increase in survival time of an individual can be measured, for example, by calculating for an individual the length of survival time following the initiation of treatment with the compound described herein. An increase in average survival time of a population can be measured, for example, by calculating for the average length of survival time following initiation of treatment with the compound described herein. An increase in survival time of an individual can be measured, for example, by calculating for an individual length of survival time following completion of a first round of treatment with a compound or pharmaceutically acceptable salt of a compound described herein. An increase in average survival time of a population can be measured, for example, by calculating for a population the average length of survival time following completion of a first round of treatment with a compound or pharmaceutically acceptable salt of a compound described herein.

[0270] Treating nucleotide repeat expansion disorders (e.g., trinucleotide repeat expansion disorders) can result in a decrease in the mortality rate of a population of treated subjects in comparison to an untreated population. For example, the mortality rate is decreased by more than 2% (e.g., more than 5%, 10%, or 25%). A decrease in the mortality rate of a population of treated subjects can be measured by any reproducible means, for example, by calculating for a population the average number of disease-related deaths per unit time following initiation of treatment with a compound or pharmaceutically acceptable salt of a compound described herein. A decrease in the mortality rate of a population can be measured, for example, by calculating for a population the average number of disease-related deaths per unit time following completion of a first round of treatment with a compound or pharmaceutically acceptable salt of a compound described herein.

A. Delivery of anti-MSH3 Agents

[0271] The delivery of an oligonucleotide to a cell e.g., a cell within a subject, such as a human subject e.g., a subject in need thereof, such as a subject having a nucleotide repeat expansion disorder (e.g., a trinucleotide repeat expansion disorder) can be achieved in a number of different ways. For example, delivery can be performed by contacting a cell with an oligonucleotide, or pharmaceutically acceptable salt thereof, either in vitro or in vivo. In vivo delivery can be performed directly by administering a composition comprising an oligonucleotide, or pharmaceutically acceptable salt thereof, to a subject. These alternatives are discussed further below.

[0272] In general, any method of delivering a nucleic acid molecule (in vitro or in vivo) can be adapted for use with an oligonucleotide (see e.g., Akhtar S. and Julian R L., (1992) Trends Cell. Biol. 2(5):139-144 and WO94/02595, which are incorporated herein by reference in their entireties). For in vivo delivery, factors to consider in order to deliver an oligonucleotide molecule include for example, biological stability of the delivered molecule, prevention of non-specific effects, and accumulation of the delivered molecule in the target tissue. The non-specific effects of an oligonucleotide can be minimized by local administration, for example, by direct injection or implantation into a tissue or topically administering the preparation. Local administration to a treatment site maximizes local concentration of the agent, limits the exposure of the agent to systemic tissues that can otherwise be harmed by the agent or that can degrade the agent, and permits a lower total dose of the oligonucleotide, or pharmaceutically acceptable salt thereof, to be administered.

[0273] For administering an oligonucleotide, or pharmaceutically acceptable salt thereof, systemically for the treatment of a disease, the oligonucleotide can include alternative nucleobases, alternative sugar moieties, and/or alternative internucleoside linkages, or alternatively delivered using a drug delivery system; both methods act to prevent the rapid degradation of the oligonucleotide by endo- and exo-nucleases in vivo. Modification of the oligonucleotide, or the pharmaceutical carrier, can permit targeting of the oligonucleotide composition to the target tissue and avoid undesirable off-target effects. Oligonucleotide molecules can be modified by chemical conjugation to lipophilic groups such as cholesterol to enhance cellular uptake and prevent degradation. In an alternative aspect, the oligonucleotide can be delivered using drug delivery systems such as a nanoparticle, a lipid nanoparticle, a polyplex nanoparticle, a lipoplex nanoparticle, a dendrimer, a polymer, liposomes, or a cationic delivery system. Positively charged cationic delivery systems facilitate binding of an oligonucleotide molecule (negatively charged) and also enhance interactions at the negatively charged cell membrane to permit efficient uptake of an oligonucleotide by the cell. Cationic lipids, dendrimers, or polymers can either be bound to an oligonucleotide, or induced to form a vesicle or micelle that encases an oligonucleotide. The formation of vesicles or micelles further prevents degradation of the oligonucleotide when administered systemically. In general, any methods of delivery of nucleic acids known in the art may be adaptable to the delivery of the oligonucleotides described herein. Methods for making and administering cationic oligonucleotide complexes are well within the abilities of one skilled in the art (see e.g., Sorensen, D R., et al. (2003) J. Mol. Biol 327:761-766; Verma, U N. et al., (2003) Clin. Cancer Res. 9:1291-1300; Arnold, A S et al., (2007) J. Hypertens. 25:197-205, which are incorporated herein by reference in their entirety). Some non-limiting examples of drug delivery systems useful for systemic delivery of oligonucleotides include DOTAP (Sorensen, D R., et al (2003), supra; Verma, U N. et al., (2003), supra), Oligofectamine, “solid nucleic acid lipid particles” (Zimmermann, T S. et al., (2006) Nature 441:111-114), cardiolipin (Chien, P Y. et al., (2005) Cancer Gene Ther. 12:321-328; Pal, A. et al., (2005) Int J. Oncol. 26:1087-1091), polyethyleneimine (Bonnet M E. et al., (2008) Pharm. Res. Aug 16 Epub ahead of print; Aigner, A. (2006) J. Biomed. Biotechnol. 71659), Arg-Gly-Asp (RGD) peptides (Liu, S. (2006) Mol. Pharm. 3:472-487), and polyamidoamines (Tomalia, D A. et al., (2007) Biochem. Soc. Trans. 35:61-67; Yoo, H. et al., (1999) Pharm. Res. 16:1799-1804). In some aspects, an oligonucleotide forms a complex with cyclodextrin for systemic administration. Methods for administration and pharmaceutical compositions of oligonucleotides and cyclodextrins can be found in U.S. Pat. No. 7,427,605, which is herein incorporated by reference in its entirety. In some aspects, the oligonucleotides described herein are delivered by polyplex or lipoplex nanoparticles. Methods for administration and pharmaceutical compositions of oligonucleotides and polyplex nanoparticles and lipoplex nanoparticles can be found in U.S. Patent Application Nos. 2017/0121454; 2016/0369269; 2016/0279256; 2016/0251478; 2016/0230189; 2015/0335764; 2015/0307554; 2015/0174549; 2014/0342003; 2014/0135376; and 2013/0317086, which are herein incorporated by reference in their entirety.

i. Membranous Molecular Assembly Delivery Methods

[0274] The oligonucleotide, or pharmaceutically acceptable salt thereof, can be delivered using a variety of membranous molecular assembly delivery methods including polymeric, biodegradable microparticle, or microcapsule delivery devices known in the art. For example, a colloidal dispersion system can be used for targeted delivery of an oligonucleotide agent described herein. Colloidal dispersion systems include macromolecule complexes, nanocapsules, microspheres, beads, and lipid-based systems including oil-in-water emulsions, micelles, mixed micelles, and liposomes. Liposomes are artificial membrane vesicles that are useful as delivery vehicles in vitro and in vivo. It has been shown that large unilamellar vesicles (LUV), which range in size from 0.2-4.0 μm can encapsulate a substantial percentage of an aqueous buffer containing large macromolecules. Liposomes are useful for the transfer and delivery of active ingredients to the site of action. Because the liposomal membrane is structurally similar to biological membranes, when liposomes are applied to a tissue, the liposomal bilayer fuses with bilayer of the cellular membranes. As the merging of the liposome and cell progresses, the internal aqueous contents that include the oligonucleotide, or pharmaceutically acceptable salt thereof, are delivered into the cell where the oligonucleotide can specifically bind to a target RNA and can mediate RNase H-mediated gene silencing. In some cases, the liposomes are also specifically targeted, e.g., to direct the oligonucleotide to particular cell types. The composition of the liposome is usually a combination of phospholipids, usually in combination with steroids, especially cholesterol. Other phospholipids or other lipids can be used. The physical characteristics of liposomes depend on pH, ionic strength, and the presence of divalent cations.

[0275] A liposome containing an oligonucleotide, or pharmaceutically acceptable salt thereof, can be prepared by a variety of methods. In one example, the lipid component of a liposome is dissolved in a detergent so that micelles are formed with the lipid component. For example, the lipid component can be an amphipathic cationic lipid or lipid conjugate. The detergent can have a high critical micelle concentration and can be nonionic. Exemplary detergents include cholate, CHAPS, octylglucoside, deoxycholate, and lauroyl sarcosine. The oligonucleotide, or pharmaceutically acceptable salt thereof, preparation is then added to the micelles that include the lipid component. The cationic groups on the lipid interact with the oligonucleotide, or pharmaceutically acceptable salt thereof, and condense around the oligonucleotide, or pharmaceutically acceptable salt thereof, to form a liposome. After condensation, the detergent is removed, e.g., by dialysis, to yield a liposomal preparation of oligonucleotide, or pharmaceutically acceptable salt thereof.

[0276] If necessary, a carrier compound that assists in condensation can be added during the condensation reaction, e.g., by controlled addition. For example, the carrier compound can be a polymer other than a nucleic acid (e.g., spermine or spermidine). The pH can be adjusted to favor condensation.

[0277] Methods for producing stable polynucleotide delivery vehicles, which incorporate a polynucleotide/cationic lipid complex as a structural component of the delivery vehicle, are further described in, e.g., WO 96/37194, the entire contents of which are incorporated herein by reference. Liposome formation can include one or more aspects of exemplary methods described in Feigner, P. L. et al., (1987) Proc. Natl. Acad. Sci. USA 8:7413-7417; U.S. Pat. Nos. 4,897,355; 5,171,678; Bangham et al., (1965) M. Mol. Biol. 23:238; Olson et al., (1979) Biochim. Biophys. Acta 557:9; Szoka et al., (1978) Proc. Natl. Acad. Sci. 75: 4194; Mayhew et al., (1984) Biochim. Biophys. Acta 775:169; Kim et al., (1983) Biochim. Biophys. Acta 728:339; and Fukunaga et al., (1984) Endocrinol. 115:757. Commonly used techniques for preparing lipid aggregates of appropriate size for use as delivery vehicles include sonication and freeze-thaw plus extrusion (see, e.g., Mayer et al., (1986) Biochim. Biophys. Acta 858:161. Microfluidization can be used when consistently small (50 to 200 nm) and relatively uniform aggregates are desired (Mayhew et al., (1984) Biochim. Biophys. Acta 775:169). These methods are readily adapted to packaging oligonucleotide, or pharmaceutically acceptable salt thereof, preparations into liposomes.

[0278] Liposomes fall into two broad classes. Cationic liposomes are positively charged liposomes which interact with the negatively charged nucleic acid molecules to form a stable complex. The positively charged nucleic acid/liposome complex binds to the negatively charged cell surface and is internalized in an endosome. Due to the acidic pH within the endosome, the liposomes are ruptured, releasing their contents into the cell cytoplasm (Wang et al. (1987) Biochem. Biophys. Res. Commun., 147:980-985).

[0279] Liposomes, which are pH-sensitive or negatively charged, entrap nucleic acids rather than complex with them. Since both the nucleic acid and the lipid are similarly charged, repulsion rather than complex formation occurs. Nevertheless, some nucleic acid is entrapped within the aqueous interior of these liposomes. pH sensitive liposomes have been used to deliver nucleic acids encoding the thymidine kinase gene to cell monolayers in culture. Expression of the exogenous gene was detected in the target cells (Zhou et al. (1992) Journal of Controlled Release, 19:269-274).

[0280] One major type of liposomal composition includes phospholipids other than naturally-derived phosphatidylcholine. Neutral liposome compositions, for example, can be formed from dimyristoyl phosphatidylcholine (DMPC) or dipalmitoyl phosphatidylcholine (DPPC). Anionic liposome compositions generally are formed from dimyristoyl phosphatidylglycerol, while anionic fusogenic liposomes are formed primarily from dioleoyl phosphatidylethanolamine (DOPE). Another type of liposomal composition is formed from phosphatidylcholine (PC) such as, for example, soybean PC, and egg PC. Another type is formed from mixtures of phospholipid and/or phosphatidylcholine and/or cholesterol.

[0281] Examples of other methods to introduce liposomes into cells in vitro and in vivo include U.S. Pat. Nos. 5,283,185; 5,171,678; WO 94/00569; WO 93/24640; WO 91/16024; Feigner, (1994) J. Biol. Chem. 269:2550; Nabel, (1993) Proc. Natl. Acad. Sci. 90:11307; Nabel, (1992) Human Gene Ther. 3:649; Gershon, (1993) Biochem. 32:7143; and Strauss, (1992) EMBO J. 11:417.

[0282] Non-ionic liposomal systems have also been examined to determine their utility in the delivery of drugs to the skin, in particular systems comprising non-ionic surfactant and cholesterol. Non-ionic liposomal formulations comprising NOVASOME™ J (glyceryl dilaurate/cholesterol/polyoxyethylene-10-stearyl ether) and NOVASOME™ II (glyceryl distearate/cholesterol/polyoxyethylene-10-stearyl ether) were used to deliver cyclosporin-A into the dermis of mouse skin. Results indicated that such non-ionic liposomal systems were effective in facilitating the deposition of cyclosporine A into different layers of the skin (Hu et al., (1994) S.T.P. Pharma. Sci., 4(6):466).

[0283] Liposomes can be sterically stabilized liposomes, comprising one or more specialized lipids that result in enhanced circulation lifetimes relative to liposomes lacking such specialized lipids. Examples of sterically stabilized liposomes are those in which part of the vesicle-forming lipid portion of the liposome (A) comprises one or more glycolipids, such as monosialoganglioside GM1, or (B) is derivatized with one or more hydrophilic polymers, such as a polyethylene glycol (PEG) moiety. While not wishing to be bound by any particular theory, it is thought in the art that, at least for sterically stabilized liposomes containing gangliosides, sphingomyelin, or PEG-derivatized lipids, the enhanced circulation half-life of these sterically stabilized liposomes derives from a reduced uptake into cells of the reticuloendothelial system (RES) (Allen et al., (1987) FEBS Letters, 223:42; Wu et al., (1993) Cancer Research, 53:3765).

[0284] Various liposomes comprising one or more glycolipids are known in the art. Papahadjopoulos et al. (Ann. N.Y. Acad. Sci., (1987), 507:64) reported the ability of monosialoganglioside G^{MB}, galactocerebroside sulfate, and phosphatidylinositol to improve blood half-lives of liposomes. These findings were expounded upon by Gabizon et al. (Proc. Natl. Acad. Sci. U.S.A., (1988), 85:6949). U.S. Pat. No. 4,837,028 and WO 88/04924, both to Allen et al., disclose liposomes comprising (1) sphingomyelin and (2) the ganglioside GM1 or a galactocerebroside sulfate ester. U.S. Pat. No. 5,543,152 (Webb et al.) discloses liposomes comprising sphingomyelin. Liposomes comprising 1,2-sn-dimyristoylphosphatidylcholine are disclosed in WO 97/13499 (Lim et al).

[0285] In one aspect, cationic liposomes are used. Cationic liposomes possess the advantage of being able to fuse to the cell membrane. Non-cationic liposomes, although not able to fuse as efficiently with the plasma membrane, are taken up by macrophages in vivo and can be used to deliver oligonucleotides to macrophages.

[0286] Further advantages of liposomes include: liposomes obtained from natural phospholipids are biocompatible and biodegradable; liposomes can incorporate a wide range of water and lipid soluble drugs; liposomes can protect encapsulated oligonucleotides in their internal compartments from metabolism and degradation (Rosoff, in “Pharmaceutical Dosage Forms,” Lieberman, Rieger and Banker (Eds.), 1988, volume 1, p. 245). Important considerations in the preparation of liposome formulations are the lipid surface charge, vesicle size and the aqueous volume of the liposomes.

[0287] A positively charged synthetic cationic lipid, N-[1-(2,3-dioleyloxy)propyl]-N,N,N-trimethylammonium chloride (DOTMA) can be used to form small liposomes that interact spontaneously with nucleic acid to form lipid-nucleic acid complexes which are capable of fusing with the negatively charged lipids of the cell membranes of tissue culture cells, resulting in delivery of oligonucleotide (see, e.g., Feigner, P. L. et al., (1987) Proc. Natl. Acad. Sci. USA 8:7413-7417, and U.S. Pat. No. 4,897,355 for a description of DOTMA and its use with DNA).

[0288] A DOTMA analogue, 1,2-bis(oleoyloxy)-3-(trimethylammonia)propane (DOTAP) can be used in combination with a phospholipid to form DNA-complexing vesicles. LIPOFECTIN™ Bethesda Research Laboratories, Gaithersburg, Md.) is an effective agent for the delivery of highly anionic nucleic acids into living tissue culture cells that comprise positively charged DOTMA liposomes which interact spontaneously with negatively charged polynucleotides to form complexes. When enough positively charged liposomes are used, the net charge on the resulting complexes is also positive. Positively charged complexes prepared in this way spontaneously attach to negatively charged cell surfaces, fuse with the plasma membrane, and efficiently deliver functional nucleic acids into, for example, tissue culture cells. Another commercially available cationic lipid, 1,2-bis(oleoyloxy)-3,3-(trimethylammonia)propane (“DOTAP”) (Boehringer Mannheim, Indianapolis, Ind.) differs from DOTMA in that the oleoyl moieties are linked by ester, rather than ether linkages.

[0289] Other reported cationic lipid compounds include those that have been conjugated to a variety of moieties including, for example, carboxyspermine which has been conjugated to one of two types of lipids and includes compounds such as 5-carboxyspermylglycine dioctaoleoylamide (“DOGS”) (TRANSFECTAM^{T}M, Promega, Madison, Wis.) and dipalmitoylphosphatidylethanolamine 5-carboxyspermyl-amide (“DPPES”) (see, e.g., U.S. Pat. No. 5,171,678).

[0290] Another cationic lipid conjugate includes derivatization of the lipid with cholesterol (“DC-Chol”) which has been formulated into liposomes in combination with DOPE (See, Gao, X. and Huang, L., (1991) Biochim. Biophys. Res. Commun. 179:280). Lipopolylysine, made by conjugating polylysine to DOPE, has been reported to be effective for transfection in the presence of serum (Zhou, X. et al., (1991) Biochim. Biophys. Acta 1065:8). For certain cell lines, these liposomes containing conjugated cationic lipids, are said to exhibit lower toxicity and provide more efficient transfection than the DOTMA-containing compositions. Other commercially available cationic lipid products include DMRIE and DMRIE-HP (Vical, La Jolla, Calif.) and Lipofectamine (DOSPA) (Life Technology, Inc., Gaithersburg, Md.). Other cationic lipids suitable for the delivery of oligonucleotides are described in WO 98/39359 and WO 96/37194.

[0291] Liposomal formulations are particularly suited for topical administration, liposomes present several advantages over other formulations. Such advantages include reduced side effects related to high systemic absorption of the administered drug, increased accumulation of the administered drug at the desired target, and the ability to administer oligonucleotide into the skin. In some implementations, liposomes are used for delivering oligonucleotide to epidermal cells and also to enhance the penetration of oligonucleotide into dermal tissues, e.g., into skin. For example, the liposomes can be applied topically. Topical delivery of drugs formulated as liposomes to the skin has been documented (see, e.g., Weiner et al., (1992) Journal of Drug Targeting, vol. 2,405-410 and du Plessis et al., (1992) Antiviral Research, 18:259-265; Mannino, R. J. and Fould-Fogerite, S., (1998) Biotechniques 6:682-690; Itani, T. et al., (1987) Gene 56:267-276; Nicolau, C. et al. (1987) Meth. Enzymol. 149:157-176; Straubinger, R. M. and Papahadjopoulos, D. (1983) Meth. Enzymol. 101:512-527; Wang, C. Y. and Huang, L., (1987) Proc. Natl. Acad. Sci. USA 84:7851-7855).

[0292] Non-ionic liposomal systems have also been examined to determine their utility in the delivery of drugs to the skin, in particular systems comprising non-ionic surfactant and cholesterol. Non-ionic liposomal formulations comprising NOVASOME I (glyceryl dilaurate/cholesterol/polyoxyethylene-10-stearyl ether) and NOVASOME II (glyceryl distearate/cholesterol/polyoxyethylene-10-stearyl ether) were used to deliver a drug into the dermis of mouse skin. Such formulations with oligonucleotides are useful for treating a dermatological disorder.

[0293] The targeting of liposomes is also possible based on, for example, organ-specificity, cell-specificity, and organelle-specificity and is known in the art. In the case of a liposomal targeted delivery system, lipid groups can be incorporated into the lipid bilayer of the liposome to maintain the targeting ligand in stable association with the liposomal bilayer. Various linking groups can be used for joining the lipid chains to the targeting ligand. Additional methods are known in the art and are described, for example in U.S. Patent Application Publication No. 20060058255, the linking groups of which are herein incorporated by reference.

[0294] Liposomes that include oligonucleotides can be made highly deformable. Such deformability can enable the liposomes to penetrate through pore that are smaller than the average radius of the liposome. For example, transfersomes are yet another type of liposomes, and are highly deformable lipid aggregates which are attractive candidates for drug delivery vehicles. Transfersomes can be described as lipid droplets which are so highly deformable that they are easily able to penetrate through pores which are smaller than the droplet. Transfersomes can be made by adding surface edge activators, usually surfactants, to a standard liposomal composition. Transfersomes that include oligonucleotides can be delivered, for example, subcutaneously by infection to deliver oligonucleotides to keratinocytes in the skin. To cross intact mammalian skin, lipid vesicles must pass through a series of fine pores, each with a diameter less than 50 nm, under the influence of a suitable transdermal gradient. In addition, due to the lipid properties, these transfersomes can be self-optimizing (adaptive to the shape of pores, e.g., in the skin), self-repairing, and can frequently reach their targets without fragmenting, and often self-loading. Transfersomes have been used to deliver serum albumin to the skin. The transfersome-mediated delivery of serum albumin has been shown to be as effective as subcutaneous injection of a solution containing serum albumin.

[0295] Other suitable formulations are described in U.S. provisional application Ser. No. 61/018,616, filed Jan. 2, 2008; 61/018,611, filed Jan. 2, 2008; 61/039,748, filed Mar. 26, 2008; 61/047,087, filed Apr. 22, 2008 and 61/051,528, filed May 8, 2008. PCT application No. PCT/US2007/080331, filed Oct. 3, 2007 also describes suitable. Surfactants find wide application in formulations such as emulsions (including microemulsions) and liposomes. The most common way of classifying and ranking the properties of the many different types of surfactants, both natural and synthetic, is by the use of the hydrophile/lipophile balance (HLB). The nature of the hydrophilic group (also known as the “head”) provides the most useful means for categorizing the different surfactants used in formulations (Rieger, in Pharmaceutical Dosage Forms, Marcel Dekker, Inc., New York, N.Y., 1988, p. 285).

[0296] If the surfactant molecule is not ionized, it is classified as a nonionic surfactant. Nonionic surfactants find wide application in pharmaceutical and cosmetic products and are usable over a wide range of pH values. In general, their HLB values range from 2 to about 18 depending on their structure. Nonionic surfactants include nonionic esters such as ethylene glycol esters, propylene glycol esters, glyceryl esters, polyglyceryl esters, sorbitan esters, sucrose esters, and ethoxylated esters. Nonionic alkanolamides and ethers such as fatty alcohol ethoxylates, propoxylated alcohols, and ethoxylated/propoxylated block polymers are also included in this class. The polyoxyethylene surfactants are the most popular members of the nonionic surfactant class.

[0297] If the surfactant molecule carries a negative charge when it is dissolved or dispersed in water, the surfactant is classified as anionic. Anionic surfactants include carboxylates such as soaps, acyl lactylates, acyl amides of amino acids, esters of sulfuric acid such as alkyl sulfates and ethoxylated alkyl sulfates, sulfonates such as alkyl benzene sulfonates, acyl isethionates, acyl taurates and sulfosuccinates, and phosphates. The most important members of the anionic surfactant class are the alkyl sulfates and the soaps.

[0298] If the surfactant molecule carries a positive charge when it is dissolved or dispersed in water, the surfactant is classified as cationic. Cationic surfactants include quaternary ammonium salts and ethoxylated amines. The quaternary ammonium salts are the most used members of this class.

[0299] If the surfactant molecule has the ability to carry either a positive or negative charge, the surfactant is classified as amphoteric. Amphoteric surfactants include acrylic acid derivatives, substituted alkylamides, N-alkylbetaines, and phosphatides.

[0300] The use of surfactants in drug products, formulations and in emulsions has been reviewed (Rieger, in Pharmaceutical Dosage Forms, Marcel Dekker, Inc., New York, N.Y., 1988, p. 285).

[0301] The oligonucleotides, or pharmaceutically acceptable salts thereof, for use in the methods can be provided as micellar formulations. Micelles are a particular type of molecular assembly in which amphipathic molecules are arranged in a spherical structure such that all the hydrophobic portions of the molecules are directed inward, leaving the hydrophilic portions in contact with the surrounding aqueous phase. The converse arrangement exists if the environment is hydrophobic.

ii. Lipid Nanoparticle-Based Delivery Methods

[0302] Oligonucleotides can be fully encapsulated in a lipid formulation, e.g., a lipid nanoparticle (LNP), or other nucleic acid-lipid particle. LNPs are extremely useful for systemic applications, as they exhibit extended circulation lifetimes following intravenous (i.v.) injection and accumulate at distal sites (e.g., sites physically separated from the administration site). LNPs include “pSPLP,” which include an encapsulated condensing agent-nucleic acid complex as set forth in PCT Publication No. WO 00/03683. The particles typically have a mean diameter of about 50 nm to about 150 nm, more typically about 60 nm to about 130 nm, more typically about 70 nm to about 110 nm, most typically about 70 nm to about 90 nm, and are substantially nontoxic. In addition, the nucleic acids when present in the nucleic acid-lipid particles are resistant in aqueous solution to degradation with a nuclease. Nucleic acid-lipid particles and their method of preparation are disclosed in, e.g., U.S. Pat. Nos. 5,976,567; 5,981,501; 6,534,484; 6,586,410; 6,815,432; U.S. Publication No. 2010/0324120 and PCT Publication No. WO 96/40964.

[0303] In one aspect, the lipid to drug ratio (mass/mass ratio) (e.g., lipid to oligonucleotide ratio) will be in the range of from about 1:1 to about 50:1, from about 1:1 to about 25:1, from about 3:1 to about 15:1, from about 4:1 to about 10:1, from about 5:1 to about 9:1, or about 6:1 to about 9:1. Ranges intermediate to the above recited ranges are also contemplated.

[0304] Non-limiting examples of cationic lipids include N,N-dioleyl-N,N-dimethylammonium chloride (DODAC), N,N-distearyl-N,N-dimethylammonium bromide (DDAB), N-(1-(2,3-dioleoyloxy)propyl)-N,N,N-trimethylammonium chloride (DOTAP), N-(1-(2,3-dioleyloxy)propyl)-N,N,N-trimethylammonium chloride (DOTMA), N,N-dimethyl-2,3-dioleyloxy)propylamine (DODMA), 1,2-DiLinoleyloxy-N,N-dimethylaminopropane (DLinDMA), 1,2-Dilinolenyloxy-N,N-dimethylaminopropane (DLenDMA), 1,2-Dilinoleylcarbamoyloxy-3-dimethylaminopropane (DLin-C-DAP), 1,2-Dilinoleyoxy-3-(dimethylamino)acetoxypropane (DLin-DAC), 1,2-Dilinoleyoxy-3-morpholinopropane (DLin-MA), 1,2-Dilinoleoyl-3-dimethylaminopropane (DLinDAP), 1,2-Dilinoleylthio-3-dimethylaminopropane (DLin-S-DMA), 1-Linoleoyl-2-linoleyloxy-3-dimethylaminopropane (DLin-2-DMAP), 1,2-Dilinoleyloxy-3-trimethylaminopropane chloride salt (DLin-TMA.Cl), 1,2-Dilinoleoyl-3-trimethylaminopropane chloride salt (DLin-TAP.Cl), 1,2-Dilinoleyloxy-3-(N-methylpiperazino)propane (DLin-MPZ), or 3-(N,N-Dilinoleylamino)-1,2-propanediol (DLinAP), 3-(N,N-Dioleylamino)-1,2-propanedio (DOAP), 1,2-Dilinoleyloxo-3-(2-N,N-dimethylamino)ethoxypropane (DLin-EG-DMA), 1,2-Dilinolenyloxy-N,N-dimethylaminopropane (DLinDMA), 2,2-Dilinoleyl-4-dimethylaminomethyl-[1,3]-dioxolane (DLin-K-DMA) or analogs thereof, (3aR,5s,6aS)-N,N-dimethyl-2,2-di((9Z,12Z)-octadeca-9,12-dienyetetrahydro-3aH-cyclopenta[d][1,3]dioxol-5-amine (ALN100), (6Z,9Z,28Z,31Z)-heptatriaconta-6,9,28,31-tetraen-19-yl4-(dimethylamino)butanoate (MC3), 1,1′-(2-(4-(2-((2-(bis(2-hydroxydodecyl)amino)ethyl)(2-hydroxydodecyl)amino)ethyl)piperazin-1-yeethylazanediyedidodecan-2-ol (Tech G1), or a mixture thereof. The cationic lipid can comprise, for example, from about 20 mol % to about 50 mol % or about 40 mol % of the total lipid present in the particle.

[0305] The ionizable/non-cationic lipid can be an anionic lipid or a neutral lipid including, but not limited to, distearoylphosphatidylcholine (DSPC), dioleoylphosphatidylcholine (DOPC), dipalmitoylphosphatidylcholine (DPPC), dioleoylphosphatidylglycerol (DOPG), dipalmitoylphosphatidylglycerol (DPPG), dioleoyl-phosphatidylethanolamine (DOPE), palmitoyloleoylphosphatidylcholine (POPC), palmitoyloleoylphosphatidylethanolamine (POPE), dioleoyl-phosphatidylethanolamine 4-(N-maleimidomethyl)-cyclohexane-1-carboxylate (DOPE-mal), dipalmitoyl phosphatidyl ethanolamine (DPPE), dimyristoylphosphoethanolamine (DMPE), distearoyl-phosphatidyl-ethanolamine (DSPE), 16-O-monomethyl PE, 16-O-dimethyl PE, 18-1-trans PE, 1-stearoyl-2-oleoyl-phosphatidyethanolamine (SOPE), cholesterol, or a mixture thereof. The non-cationic lipid can be, for example, from about 5 mol % to about 90 mol %, about 10 mol %, or about 60 mol % if cholesterol is included, of the total lipid present in the particle.

[0306] The conjugated lipid that inhibits aggregation of particles can be, for example, a polyethyleneglycol (PEG)-lipid including, without limitation, a PEG-diacylglycerol (DAG), a PEG-dialkyloxypropyl (DAA), a PEG-phospholipid, a PEG-ceramide (Cer), or a mixture thereof. The PEG-DAA conjugate can be, for example, a PEG-dilauryloxypropyl (C₁₂), a PEG-dimyristyloxypropyl (C₁₄), a PEG-dipalmityloxypropyl (C₁₆), or a PEG-distearyloxypropyl (Cis). The conjugated lipid that prevents aggregation of particles can be, for example, from 0 mol % to about 20 mol % or about 2 mol % of the total lipid present in the particle.

[0307] In some aspects, the nucleic acid-lipid particle further includes cholesterol at, e.g., about 10 mol % to about 60 mol % or about 50 mol % of the total lipid present in the particle.

### B. Combination Therapies

[0308] An oligonucleotide, or pharmaceutically acceptable salt thereof, can be used alone or in combination with at least one additional therapeutic agent, e.g., other agents that treat nucleotide repeat expansion disorders (e.g., trinucleotide repeat expansion disorders) or symptoms associated therewith, or in combination with other types of therapies to treat nucleotide repeat expansion disorders (e.g., trinucleotide repeat expansion disorders). In combination treatments, the dosages of one or more of the therapeutic compounds can be reduced from standard dosages when administered alone. For example, doses can be determined empirically from drug combinations and permutations or can be deduced by isobolographic analysis (e.g., Black et al., Neurology 65:S3-S6 (2005)). In this case, dosages of the compounds when combined should provide a therapeutic effect.

[0309] In some aspects, the oligonucleotide, or pharmaceutically acceptable salt thereof, agents described herein can be used in combination with at least one additional therapeutic agent to treat a nucleotide repeat expansion disorder (e.g., a trinucleotide repeat expansion disorder) associated with gene having a nucleotide repeat (e.g., any of the trinucleotide repeat expansion disorders and associated genes having a nucleotide repeat listed in Table 1). In some aspects, at least one of the additional therapeutic agents can be an oligonucleotide (e.g., an ASO) that hybridizes with the mRNA of gene associated with a nucleotide or trinucleotide repeat expansion disorder (e.g., any of the genes listed in Table 1). In some aspects, the nucleotide repeat expansion disorder (e.g., a trinucleotide repeat expansion disorder) is Huntington's disease (HD). In some aspects, the gene associated with a nucleotide repeat expansion disorder (e.g., a trinucleotide repeat expansion disorder) is Huntingtin (HTT). Several allelic variants of the Huntingtin gene have been implicated in the etiology of Huntington's disease. In some cases, these variants are identified on the basis of having unique HD-associated single nucleotide polymorphisms (SNPs). In some aspects, the oligonucleotide hybridizes to an mRNA of the Huntingtin gene containing any of the HD-associated SNPs known in the art (e.g., any of the HD-associated SNPs described in Skotte et al., PLoS One 2014, 9(9): e107434, Carroll et al., Mol. Ther. 2011, 19(12): 2178-85, Warby et al., Am. J. Hum. Gen. 2009, 84(3): 351-66 (herein incorporated by reference)). In some aspects, the oligonucleotide that is an additional therapeutic agent hybridizes to an mRNA of the Huntingtin gene lacking any of the HD-associated SNPs. In some of the aspects, the oligonucleotide, or pharmaceutically acceptable salt thereof, that is an additional therapeutic agent hybridizes to an mRNA of the Huntingtin gene having any of the SNPs selected from the group of rs362307 and rs365331. In some aspects, the oligonucleotide, or pharmaceutically acceptable salt thereof, that is an additional therapeutic agent can be a modified oligonucleotide (e.g., an oligonucleotide including any of the modifications described herein). In some aspects, the modified oligonucleotides that is an additional therapeutic agent comprise one or more phosphorothioate internucleoside linkages. In some aspects, the modified oligonucleotide comprises one or more 2′-MOE moieties. In some aspects, the oligonucleotide that is an additional therapeutic agent that hybridizes to the mRNA of the Huntingtin gene has a sequence selected from the SEQ ID NOs. 6-285 of U.S. Pat. No. 9,006,198; SEQ ID NOs. 6-8 of US Patent Application Publication No. 2017/0044539; SEQ ID NOs. 1-1565 of US Patent Application Publication 2018/0216108; and SEQ ID NOs. 1-2432 of PCT Publication WO 2017/192679, the sequences of which are hereby incorporated by reference.

[0310] In some aspects, at least one of the additional therapeutic agents is a chemotherapeutic agent (e.g., a cytotoxic agent or other chemical compound useful in the treatment of a nucleotide repeat expansion disorder, e.g., a trinucleotide repeat expansion disorder).

[0311] In some aspects, at least one of the additional therapeutic agents can be a therapeutic agent which is a non-drug treatment. For example, at least one of the additional therapeutic agents is physical therapy.

[0312] In any of the combination aspects described herein, the two or more therapeutic agents are administered simultaneously or sequentially, in either order. For example, a first therapeutic agent can be administered immediately, up to 1 hour, up to 2 hours, up to 3 hours, up to 4 hours, up to 5 hours, up to 6 hours, up to 7 hours, up to, 8 hours, up to 9 hours, up to 10 hours, up to 11 hours, up to 12 hours, up to 13 hours, 14 hours, up to hours 16, up to 17 hours, up 18 hours, up to 19 hours up to 20 hours, up to 21 hours, up to 22 hours, up to 23 hours up to 24 hours or up to 1-7, 1-14, 1-21 or 1-30 days before or after one or more of the additional therapeutic agents.

### V. Pharmaceutical Compositions

[0313] The oligonucleotides, or pharmaceutically acceptable salt thereof, described herein are formulated into pharmaceutical compositions for administration to human subjects in a biologically compatible form suitable for administration in vivo.

[0314] The compounds described herein can be used in the form of the free base, in the form of salts, solvates, and as prodrugs. All forms are within the methods described herein. In accordance with the methods described herein, the described oligonucleotides or salts, solvates, or prodrugs thereof can be administered to a patient in a variety of forms depending on the selected route of administration, as will be understood by those skilled in the art. The compounds described herein can be administered, for example, by oral, parenteral, intrathecal, intracerebroventricular, intraparenchymal, buccal, sublingual, intraocular (subretinal, intravitreal), intra cisterna magna (ICM), nasal, rectal, patch, pump, or transdermal administration and the pharmaceutical compositions formulated accordingly. Parenteral administration includes intravenous, intraperitoneal, subcutaneous, intramuscular, transepithelial, nasal, intrapulmonary, intrathecal, intraocular, intracerebroventricular, intraparenchymal, rectal, and topical modes of administration. Parenteral administration can be by continuous infusion over a selected period of time.

[0315] A compound described herein can be orally administered, for example, with an inert diluent or with an assimilable edible carrier, or it can be enclosed in hard or soft shell gelatin capsules, or it can be compressed into tablets, or it can be incorporated directly with the food of the diet. For oral therapeutic administration, a compound described herein can be incorporated with an excipient and used in the form of ingestible tablets, buccal tablets, troches, capsules, elixirs, suspensions, syrups, and wafers. A compound described herein can be administered parenterally. Solutions of a compound described herein can be prepared in water suitably mixed with a surfactant, such as hydroxypropylcellulose. Dispersions can be prepared in glycerol, liquid polyethylene glycols, DMSO, and mixtures thereof with or without alcohol, and in oils. Under ordinary conditions of storage and use, these preparations can contain a preservative to prevent the growth of microorganisms. Conventional procedures and ingredients for the selection and preparation of suitable formulations are described, for example, in Remington's Pharmaceutical Sciences (2012, 22nd ed.) and in The United States Pharmacopeia: The National Formulary (USP 41 NF 36), published in 2018. The pharmaceutical forms suitable for injectable use include sterile aqueous solutions or dispersions and sterile powders for the extemporaneous preparation of sterile injectable solutions or dispersions. In all cases the form must be sterile and must be fluid to the extent that can be easily administered via syringe. Compositions for nasal administration can conveniently be formulated as aerosols, drops, gels, and powders. Aerosol formulations typically include a solution or fine suspension of the active substance in a physiologically acceptable aqueous or non-aqueous solvent and are usually presented in single or multidose quantities in sterile form in a sealed container, which can take the form of a cartridge or refill for use with an atomizing device. Alternatively, the sealed container can be a unitary dispensing device, such as a single dose nasal inhaler or an aerosol dispenser fitted with a metering valve which is intended for disposal after use. Where the dosage form includes an aerosol dispenser, it will contain a propellant, which can be a compressed gas, such as compressed air or an organic propellant, such as fluorochlorohydrocarbon. The aerosol dosage forms can take the form of a pump-atomizer. Compositions suitable for buccal or sublingual administration include tablets, lozenges, and pastilles, where the active ingredient is formulated with a carrier, such as sugar, acacia, tragacanth, gelatin, and glycerine. Compositions for rectal administration are conveniently in the form of suppositories containing a conventional suppository base, such as cocoa butter

[0316] The compounds described herein can be administered to an animal, e.g., a human, alone or in combination with pharmaceutically acceptable carriers, as noted herein, the proportion of which is determined by the solubility and chemical nature of the compound, chosen route of administration, and standard pharmaceutical practice.

### VI. Dosages

[0317] The dosage of the compositions (e.g., a composition including an oligonucleotide, or pharmaceutically acceptable salt thereof, described herein, can vary depending on many factors, such as the pharmacodynamic properties of the compound; the mode of administration; the age, health, and weight of the recipient; the nature and extent of the symptoms; the frequency of the treatment, and the type of concurrent treatment, if any; and the clearance rate of the compound in the animal to be treated. The compositions described herein can be administered initially in a suitable dosage that can be adjusted as required, depending on the clinical response. In some aspects, the dosage of a composition (e.g., a composition including an oligonucleotide, or pharmaceutically acceptable salt thereof) is a prophylactically or a therapeutically effective amount.

### VI. Kits

[0318] Kits including (a) a pharmaceutical composition including an oligonucleotide, or pharmaceutically acceptable salt thereof, agent that reduces the level and/or activity of MSH3 in a cell or subject described herein, and (b) a package insert with instructions to perform any of the methods described herein are contemplated. In some aspects, the kit includes (a) a pharmaceutical composition including an oligonucleotide, or pharmaceutically acceptable salt thereof, agent that reduces the level and/or activity of MSH3 in a cell or subject described herein, (b) an additional therapeutic agent, and (c) a package insert with instructions to perform any of the methods described herein.

### Example

### Example 1. Design and Selection of Antisense Oligonucleotides

[0319] Identification and selection of target transcripts: Target transcript selection and off-target scoring (below) utilized NCBI RefSeq sequences, downloaded from NCBI 21 Nov. 2018. Experimentally validated “NM” transcript models were used except for cynomolgus monkey, which only has “XM” predicted models for the large majority of genes. The longest human, mouse, rat, and cynomolgus monkey MSH3 transcript that contained all mapped internal exons was selected (SEQ IDs 286, 287, 288, and 289 for human, wild-type human variants, mouse, rat, and cynomolgus monkey, respectively).

### Knock Down by ASOs

[0320] ASO screen in Hela cells to identify top ASO for MSH3 gene will be performed by Horizon.

[0321] In summary: ASO knockdown activity will be evaluated in HeLa by transfection at 1 nM and 10 nM. mRNA knockdown will be analyzed by quantitative reverse transcription polymerase chain reaction (RT-qPCR) using TaqMan Gene Expression probes. mRNA expression will be calculated via delta-delta Ct (ΔΔCT) method where target expression will be normalized to expression of the reference gene beta-glucuronidase (GUSB) and to cells treated with a scrambled luciferase targeting control ASO.

### Transfection in HeLa Cells

[0322] ASOs will be resuspended in dH2O to 1000-fold their final assay concentration (10 uM or 1 uM). ASOs will be dispensed in quadruplicates and complexed with 5 ul of Lipofectamine 3000 (Invitrogen) for 20 minutes before HeLa cells will be added at 2,500 cells/well. Cells will be cultured under standard culturing conditions for 24 hours. Cells will be processed for RT-qPCR readout using the Cells-to-CT 1-step TaqMan Kit (Invitrogen) according to manufacturer's instructions. TaqMan Gene Expression probe for MSH3 will be Hs00989003_m1 (Life Technologies Ltd) on a QuantStudio 6 (Applied BioSystems).

TABLE 2
Key to Chemical Modifiers in Tables 3 and 4

| | |
|---|---|
| “s” after base | phosphorothioate linkage |
| “p” after base | phosphodiester linkage |
| “o” before base | moe (2′-O-methoxyethyl-RNA) |
| “d” before base | deoxy (a DNA nucleoside) |
| ACTG | core DNA bases: adenine; cytosine; |
| | thymine; and guanine |
| “5m” | methyl at position 5 on the nucleobase; |
| | all C (cytosine) are 5-methyl. |
| “moe U” | synonymous with “moe T” |
| “moe T” | synonymous with “moe U” |
| L | LNA (e.g., A-LNA, 5mC-LNA, G-LNA, and T-LNA) |

[0323] moeT can be substituted for one or more of the moeU nucleotides listed in any of the sequences below. Similarly, moeU can be substituted for one or more of the moeT nucleotides listed in any of the sequences below.

[0324] In Table 3 below, the SEQ ID No. corresponds to the nucleobase sequence of the Antisense Oligo No. However, the specific Antisense Oligo No. (e.g., Antisense Oligo No. 1) includes the specified chemical modifications.

TABLE 3

| Antisense | |
|---|---|
| Oligo No./ | |
| SEQ ID NO: | ASO Sequence |
| 1 | [oTs\|LAs\|oAs\|oAs\|oTs\|oAs\|oTs\|oTs\|dGs\|dAs\|dGs\|5mCs\|dTs\|5mCs\|dTs\|5mCs\|dGs\|dGs\|oGs\|o5mC] |
| 2 | [oTs\|oAs\|LAs\|oAs\|oTs\|oAs\|oTs\|oTs\|dGs\|dAs\|dGs\|5mCs\|dTs\|5mCs\|dTs\|5mCs\|dGs\|dGs\|oGs\|o5mC] |
| 3 | [oTs\|oAs\|oAs\|LAs\|oTs\|oAs\|oTs\|oTs\|dGs\|dAs\|dGs\|5mCs\|dTs\|5mCs\|dTs\|5mCs\|dGs\|dGs\|oGs\|o5mC] |
| 4 | [oTs\|oAs\|oAs\|oAs\|LTs\|oAs\|oTs\|oTs\|dGs\|dAs\|dGs\|5mCs\|dTs\|5mCs\|dTs\|5mCs\|dGs\|dGs\|oGs\|o5mC] |
| 5 | [oTs\|oAs\|oAs\|oAs\|oTs\|LAs\|oTs\|oTs\|dGs\|dAs\|dGs\|5mCs\|dTs\|5mCs\|dTs\|5mCs\|dGs\|dGs\|oGs\|o5mC] |
| 6 | [oTs\|oAs\|oAs\|oAs\|oTs\|oAs\|LTs\|oTs\|dGs\|dAs\|dGs\|5mCs\|dTs\|5mCs\|dTs\|5mCs\|dGs\|dGs\|oGs\|o5mC] |
| 7 | [oTs\|oAs\|dAs\|dAs\|dTs\|dAs\|dTs\|dTs\|dGs\|dAs\|dGs\|5mCs\|oTs\|o5mCs\|oTs\|o5mCs\|oGs\|oGs\|LGs\|o5mC] |
| 8 | [oTs\|oAs\|dAs\|dAs\|dTs\|dAs\|dTs\|dTs\|dGs\|dAs\|dGs\|5mCs\|oTs\|o5mCs\|oTs\|o5mCs\|oGs\|LGs\|oGs\|o5mC] |
| 9 | [oTs\|oAs\|dAs\|dAs\|dTs\|dAs\|dTs\|dTs\|dGs\|dAs\|dGs\|5mCs\|oTs\|o5mCs\|oTs\|o5mCs\|LGs\|oGs\|oGs\|o5mC] |
| 10 | [oTs\|oAs\|dAs\|dAs\|dTs\|dAs\|dTs\|dTs\|dGs\|dAs\|dGs\|5mCs\|oTs\|o5mCs\|oTs\|L5mCs\|oGs\|oGs\|oGs\|o5mC] |
| 11 | [oTs\|oAs\|dAs\|dAs\|dTs\|dAs\|dTs\|dTs\|dGs\|dAs\|dGs\|5mCs\|oTs\|o5mCs\|LTs\|o5mCs\|oGs\|oGs\|oGs\|o5mC] |
| 12 | [oTs\|oAs\|dAs\|dAs\|dTs\|dAs\|dTs\|dTs\|dGs\|dAs\|dGs\|5mCs\|oTs\|L5mCs\|oTs\|o5mCs\|oGs\|oGs\|oGs\|o5mC] |
| 13 | [oTs\|LAs\|oAs\|oAs\|oTs\|oAs\|oTs\|dTs\|dGs\|dAs\|dGs\|5mCs\|dTs\|5mCs\|dTs\|5mCs\|dGs\|oGs\|oGs\|o5mC] |
| 14 | [oTs\|oAs\|LAs\|oAs\|oTs\|oAs\|oTs\|dTs\|dGs\|dAs\|dGs\|5mCs\|dTs\|5mCs\|dTs\|5mCs\|dGs\|oGs\|oGs\|o5mC] |
| 15 | [oTs\|oAs\|oAs\|LAs\|oTs\|oAs\|oTs\|dTs\|dGs\|dAs\|dGs\|5mCs\|dTs\|5mCs\|dTs\|5mCs\|dGs\|oGs\|oGs\|o5mC] |
| 16 | [oTs\|oAs\|oAs\|oAs\|LTs\|oAs\|oTs\|dTs\|dGs\|dAs\|dGs\|5mCs\|dTs\|5mCs\|dTs\|5mCs\|dGs\|oGs\|oGs\|o5mC] |
| 17 | [oTs\|oAs\|oAs\|oAs\|oTs\|LAs\|oTs\|dTs\|dGs\|dAs\|dGs\|5mCs\|dTs\|5mCs\|dTs\|5mCs\|dGs\|oGs\|oGs\|o5mC] |
| 18 | [oTs\|oAs\|oAs\|dAs\|dTs\|dAs\|dTs\|dTs\|dGs\|dAs\|dGs\|5mCs\|dTs\|o5mCs\|oTs\|o5mCs\|oGs\|oGs\|LGs\|o5mC] |
| 19 | [oTs\|oAs\|oAs\|dAs\|dTs\|dAs\|dTs\|dTs\|dGs\|dAs\|dGs\|5mCs\|dTs\|o5mCs\|oTs\|o5mCs\|oGs\|LGs\|oGs\|o5mC] |
| 20 | [oTs\|oAs\|oAs\|dAs\|dTs\|dAs\|dTs\|dTs\|dGs\|dAs\|dGs\|5mCs\|dTs\|o5mCs\|oTs\|o5mCs\|LGs\|oGs\|oGs\|o5mC] |
| 21 | [oTs\|oAs\|oAs\|dAs\|dTs\|dAs\|dTs\|dTs\|dGs\|dAs\|dGs\|5mCs\|dTs\|o5mCs\|oTs\|L5mCs\|oGs\|oGs\|oGs\|o5mC] |
| 22 | [oTs\|oAs\|oAs\|dAs\|dTs\|dAs\|dTs\|dTs\|dGs\|dAs\|dGs\|5mCs\|dTs\|o5mCs\|LTs\|o5mCs\|oGs\|oGs\|oGs\|o5mC] |
| 23 | [oTs\|LAs\|oAs\|oAs\|oTs\|oAs\|oTs\|dTs\|dGs\|dAs\|dGs\|5mCs\|dTs\|5mCs\|dTs\|5mCs\|dGs\|oGs\|oG] |
| 24 | [oTs\|oAs\|LAs\|oAs\|oTs\|oAs\|oTs\|dTs\|dGs\|dAs\|dGs\|5mCs\|dTs\|5mCs\|dTs\|5mCs\|dGs\|oGs\|oG] |
| 25 | [oTs\|oAs\|oAs\|LAs\|oTs\|oAs\|oTs\|dTs\|dGs\|dAs\|dGs\|5mCs\|dTs\|5mCs\|dTs\|5mCs\|dGs\|oGs\|oG] |
| 26 | [oTs\|oAs\|oAs\|oAs\|LTs\|oAs\|oTs\|dTs\|dGs\|dAs\|dGs\|5mCs\|dTs\|5mCs\|dTs\|5mCs\|dGs\|oGs\|oG] |
| 27 | [oTs\|oAs\|oAs\|oAs\|oTs\|LAs\|oTs\|dTs\|dGs\|dAs\|dGs\|5mCs\|dTs\|5mCs\|dTs\|5mCs\|dGs\|oGs\|oG] |
| 28 | [oAs\|oAs\|dAs\|dTs\|dAs\|dTs\|dTs\|dGs\|dAs\|dGs\|5mCs\|dTs\|o5mCs\|oTs\|o5mCs\|oGs\|oGs\|LGs\|o5mC] |
| 29 | [oAs\|oAs\|dAs\|dTs\|dAs\|dTs\|dTs\|dGs\|dAs\|dGs\|5mCs\|dTs\|o5mCs\|oTs\|o5mCs\|oGs\|LGs\|oGs\|o5mC] |
| 30 | [oAs\|oAs\|dAs\|dTs\|dAs\|dTs\|dTs\|dGs\|dAs\|dGs\|5mCs\|dTs\|o5mCs\|oTs\|o5mCs\|LGs\|oGs\|oGs\|o5mC] |
| 31 | [oAs\|oAs\|dAs\|dTs\|dAs\|dTs\|dTs\|dGs\|dAs\|dGs\|5mCs\|dTs\|o5mCs\|oTs\|L5mCs\|oGs\|oGs\|oGs\|o5mC] |
| 32 | [oAs\|oAs\|dAs\|dTs\|dAs\|dTs\|dTs\|dGs\|dAs\|dGs\|5mCs\|dTs\|o5mCs\|LTs\|o5mCs\|oGs\|oGs\|oGs\|o5mC] |
| 33 | [oTs\|LAs\|oAs\|oAs\|oTs\|oAs\|dTs\|dTs\|dGs\|dAs\|dGs\|5mCs\|dTs\|5mCs\|dTs\|5mCs\|oGs\|oGs\|oGs\|o5mC] |
| 34 | [oTs\|oAs\|LAs\|oAs\|oTs\|oAs\|dTs\|dTs\|dGs\|dAs\|dGs\|5mCs\|dTs\|5mCs\|dTs\|5mCs\|oGs\|oGs\|oGs\|o5mC] |
| 35 | [oTs\|oAs\|oAs\|LAs\|oTs\|oAs\|dTs\|dTs\|dGs\|dAs\|dGs\|5mCs\|dTs\|5mCs\|dTs\|5mCs\|oGs\|oGs\|oGs\|o5mC] |
| 36 | [oTs\|oAs\|oAs\|oAs\|LTs\|oAs\|dTs\|dTs\|dGs\|dAs\|dGs\|5mCs\|dTs\|5mCs\|dTs\|5mCs\|oGs\|oGs\|oGs\|o5mC] |
| 37 | [oTs\|oAs\|oAs\|oAs\|dTs\|dAs\|dTs\|dTs\|dGs\|dAs\|dGs\|5mCs\|dTs\|5mCs\|oTs\|o5mCs\|oGs\|oGs\|LGs\|o5mC] |
| 38 | [oTs\|oAs\|oAs\|oAs\|dTs\|dAs\|dTs\|dTs\|dGs\|dAs\|dGs\|5mCs\|dTs\|5mCs\|oTs\|o5mCs\|oGs\|LGs\|oGs\|o5mC] |
| 39 | [oTs\|oAs\|oAs\|oAs\|dTs\|dAs\|dTs\|dTs\|dGs\|dAs\|dGs\|5mCs\|dTs\|5mCs\|oTs\|o5mCs\|LGs\|oGs\|oGs\|o5mC] |
| 40 | [oTs\|oAs\|oAs\|oAs\|dTs\|dAs\|dTs\|dTs\|dGs\|dAs\|dGs\|5mCs\|dTs\|5mCs\|oTs\|L5mCs\|oGs\|oGs\|oGs\|o5mC] |
| 41 | [oTs\|LAs\|oAs\|oAs\|oTs\|oAs\|dTs\|dTs\|dGs\|dAs\|dGs\|5mCs\|dTs\|5mCs\|dTs\|5mCs\|oGs\|oGs\|oG] |
| 42 | [oTs\|oAs\|LAs\|oAs\|oTs\|oAs\|dTs\|dTs\|dGs\|dAs\|dGs\|5mCs\|dTs\|5mCs\|dTs\|5mCs\|oGs\|oGs\|oG] |
| 43 | [oTs\|oAs\|oAs\|LAs\|oTs\|oAs\|dTs\|dTs\|dGs\|dAs\|dGs\|5mCs\|dTs\|5mCs\|dTs\|5mCs\|oGs\|oGs\|oG] |
| 44 | [oTs\|oAs\|oAs\|oAs\|LTs\|oAs\|dTs\|dTs\|dGs\|dAs\|dGs\|5mCs\|dTs\|5mCs\|dTs\|5mCs\|oGs\|oGs\|oG] |
| 45 | [oTs\|oAs\|oAs\|dAs\|dTs\|dAs\|dTs\|dTs\|dGs\|dAs\|dGs\|5mCs\|dTs\|5mCs\|oTs\|o5mCs\|oGs\|oGs\|LGs\|o5mC] |
| 46 | [oTs\|oAs\|oAs\|dAs\|dTs\|dAs\|dTs\|dTs\|dGs\|dAs\|dGs\|5mCs\|dTs\|5mCs\|oTs\|o5mCs\|oGs\|LGs\|oGs\|o5mC] |
| 47 | [oTs\|oAs\|oAs\|dAs\|dTs\|dAs\|dTs\|dTs\|dGs\|dAs\|dGs\|5mCs\|dTs\|5mCs\|oTs\|o5mCs\|LGs\|oGs\|oGs\|o5mC] |
| 48 | [oTs\|LAs\|oAs\|oAs\|oTs\|oAs\|dTs\|dTs\|dGs\|dAs\|dGs\|5mCs\|dTs\|5mCs\|dTs\|5mCs\|oGs\|oG] |
| 49 | [oTs\|oAs\|LAs\|oAs\|oTs\|oAs\|dTs\|dTs\|dGs\|dAs\|dGs\|5mCs\|dTs\|5mCs\|dTs\|5mCs\|oGs\|oG] |
| 50 | [oTs\|oAs\|oAs\|LAs\|oTs\|oAs\|dTs\|dTs\|dGs\|dAs\|dGs\|5mCs\|dTs\|5mCs\|dTs\|5mCs\|oGs\|oG] |
| 51 | [oTs\|oAs\|oAs\|oAs\|LTs\|oAs\|dTs\|dTs\|dGs\|dAs\|dGs\|5mCs\|dTs\|5mCs\|dTs\|5mCs\|oGs\|oG] |
| 52 | [oAs\|oAs\|dTs\|dAs\|dTs\|dTs\|dGs\|dAs\|dGs\|5mCs\|dTs\|5mCs\|oTs\|o5mCs\|oGs\|oGs\|LGs\|o5mC] |
| 53 | [oAs\|oAs\|dTs\|dAs\|dTs\|dTs\|dGs\|dAs\|dGs\|5mCs\|dTs\|5mCs\|oTs\|o5mCs\|oGs\|LGs\|oGs\|o5mC] |
| 54 | [oAs\|oAs\|dTs\|dAs\|dTs\|dTs\|dGs\|dAs\|dGs\|5mCs\|dTs\|5mCs\|oTs\|o5mCs\|LGs\|oGs\|oGs\|o5mC] |
| 55 | [oAs\|oAs\|dTs\|dAs\|dTs\|dTs\|dGs\|dAs\|dGs\|5mCs\|dTs\|5mCs\|oTs\|L5mCs\|oGs\|oGs\|oGs\|o5mC] |
| 56 | [oTs\|LAs\|oAs\|oAs\|oTs\|dAs\|dTs\|dTs\|dGs\|dAs\|dGs\|5mCs\|dTs\|5mCs\|dTs\|o5mCs\|oGs\|oGs\|oGs\|o5mC] |
| 57 | [oTs\|oAs\|LAs\|oAs\|oTs\|dAs\|dTs\|dTs\|dGs\|dAs\|dGs\|5mCs\|dTs\|5mCs\|dTs\|o5mCs\|oGs\|oGs\|oGs\|o5mC] |
| 58 | [oTs\|oAs\|oAs\|LAs\|oTs\|dAs\|dTs\|dTs\|dGs\|dAs\|dGs\|5mCs\|dTs\|5mCs\|dTs\|o5mCs\|oGs\|oGs\|oGs\|o5mC] |
| 59 | [oTs\|oAs\|oAs\|oAs\|oTs\|dAs\|dTs\|dTs\|dGs\|dAs\|dGs\|5mCs\|dTs\|5mCs\|dTs\|o5mCs\|oGs\|oGs\|LGs\|o5mC] |
| 60 | [oTs\|oAs\|oAs\|oAs\|oTs\|dAs\|dTs\|dTs\|dGs\|dAs\|dGs\|5mCs\|dTs\|5mCs\|dTs\|o5mCs\|oGs\|LGs\|oGs\|o5mC] |
| 61 | [oTs\|oAs\|oAs\|oAs\|oTs\|dAs\|dTs\|dTs\|dGs\|dAs\|dGs\|5mCs\|dTs\|5mCs\|dTs\|o5mCs\|LGs\|oGs\|oGs\|o5mC] |
| 62 | [oTs\|LAs\|oAs\|oAs\|oTs\|dAs\|dTs\|dTs\|dGs\|dAs\|dGs\|5mCs\|dTs\|5mCs\|dTs\|o5mCs\|oGs\|oGs\|oG] |
| 63 | [oTs\|oAs\|LAs\|oAs\|oTs\|dAs\|dTs\|dTs\|dGs\|dAs\|dGs\|5mCs\|dTs\|5mCs\|dTs\|o5mCs\|oGs\|oGs\|oG] |
| 64 | [oTs\|oAs\|oAs\|LAs\|oTs\|dAs\|dTs\|dTs\|dGs\|dAs\|dGs\|5mCs\|dTs\|5mCs\|dTs\|o5mCs\|oGs\|oGs\|oG] |
| 65 | [oAs\|oAs\|oAs\|oTs\|dAs\|dTs\|dTs\|dGs\|dAs\|dGs\|5mCs\|dTs\|5mCs\|dTs\|o5mCs\|oGs\|oGs\|LGs\|o5mC] |
| 66 | [oAs\|oAs\|oAs\|oTs\|dAs\|dTs\|dTs\|dGs\|dAs\|dGs\|5mCs\|dTs\|5mCs\|dTs\|o5mCs\|oGs\|LGs\|oGs\|o5mC] |
| 67 | [oAs\|oAs\|oAs\|oTs\|dAs\|dTs\|dTs\|dGs\|dAs\|dGs\|5mCs\|dTs\|5mCs\|dTs\|o5mCs\|LGs\|oGs\|oGs\|o5mC] |
| 68 | [oTs\|LAs\|oAs\|oAs\|oTs\|dAs\|dTs\|dTs\|dGs\|dAs\|dGs\|5mCs\|dTs\|5mCs\|dTs\|o5mCs\|oGs\|oG] |
| 69 | [oTs\|oAs\|LAs\|oAs\|oTs\|dAs\|dTs\|dTs\|dGs\|dAs\|dGs\|5mCs\|dTs\|5mCs\|dTs\|o5mCs\|oGs\|oG] |
| 70 | [oTs\|oAs\|oAs\|LAs\|oTs\|dAs\|dTs\|dTs\|dGs\|dAs\|dGs\|5mCs\|dTs\|5mCs\|dTs\|o5mCs\|oGs\|oG] |
| 71 | [oAs\|oAs\|oTs\|dAs\|dTs\|dTs\|dGs\|dAs\|dGs\|5mCs\|dTs\|5mCs\|dTs\|o5mCs\|oGs\|oGs\|LGs\|o5mC] |
| 72 | [oAs\|oAs\|oTs\|dAs\|dTs\|dTs\|dGs\|dAs\|dGs\|5mCs\|dTs\|5mCs\|dTs\|o5mCs\|oGs\|LGs\|oGs\|o5mC] |
| 73 | [oAs\|oAs\|oTs\|dAs\|dTs\|dTs\|dGs\|dAs\|dGs\|5mCs\|dTs\|5mCs\|dTs\|o5mCs\|LGs\|oGs\|oGs\|o5mC] |
| 74 | [oTs\|LAs\|oAs\|oAs\|oTs\|dAs\|dTs\|dTs\|dGs\|dAs\|dGs\|5mCs\|dTs\|5mCs\|dTs\|o5mCs\|oG] |
| 75 | [oTs\|oAs\|LAs\|oAs\|oTs\|dAs\|dTs\|dTs\|dGs\|dAs\|dGs\|5mCs\|dTs\|5mCs\|dTs\|o5mCs\|oG] |
| 76 | [oTs\|oAs\|oAs\|LAs\|oTs\|dAs\|dTs\|dTs\|dGs\|dAs\|dGs\|5mCs\|dTs\|5mCs\|dTs\|o5mCs\|oG] |
| 77 | [oAs\|oTs\|dAs\|dTs\|dTs\|dGs\|dAs\|dGs\|5mCs\|dTs\|5mCs\|dTs\|o5mCs\|oGs\|oGs\|LGs\|o5mC] |
| 78 | [oAs\|oTs\|dAs\|dTs\|dTs\|dGs\|dAs\|dGs\|5mCs\|dTs\|5mCs\|dTs\|o5mCs\|oGs\|LGs\|oGs\|o5mC] |
| 79 | [oAs\|oTs\|dAs\|dTs\|dTs\|dGs\|dAs\|dGs\|5mCs\|dTs\|5mCs\|dTs\|o5mCs\|LGs\|oGs\|oGs\|o5mC] |
| 80 | [oAs\|LAs\|oAs\|oTs\|dAs\|dTs\|dTs\|dGs\|dAs\|dGs\|5mCs\|dTs\|5mCs\|dTs\|o5mCs\|oGs\|oGs\|oGs\|o5mC] |
| 81 | [oAs\|oAs\|LAs\|oTs\|dAs\|dTs\|dTs\|dGs\|dAs\|dGs\|5mCs\|dTs\|5mCs\|dTs\|o5mCs\|oGs\|oGs\|oGs\|o5mC] |
| 82 | [oTs\|oAs\|oAs\|oAs\|oTs\|dAs\|dTs\|dTs\|dGs\|dAs\|dGs\|5mCs\|dTs\|5mCs\|dTs\|o5mCs\|oGs\|LGs\|oG] |
| 83 | [oTs\|oAs\|oAs\|oAs\|oTs\|dAs\|dTs\|dTs\|dGs\|dAs\|dGs\|5mCs\|dTs\|5mCs\|dTs\|o5mCs\|LGs\|oGs\|oG] |
| 84 | [oAs\|LAs\|oAs\|oTs\|dAs\|dTs\|dTs\|dGs\|dAs\|dGs\|5mCs\|dTs\|5mCs\|dTs\|o5mCs\|oGs\|oGs\|oG] |
| 85 | [oAs\|oAs\|LAs\|oTs\|dAs\|dTs\|dTs\|dGs\|dAs\|dGs\|5mCs\|dTs\|5mCs\|dTs\|o5mCs\|oGs\|oGs\|oG] |
| 86 | [oAs\|oAs\|oAs\|oTs\|dAs\|dTs\|dTs\|dGs\|dAs\|dGs\|5mCs\|dTs\|5mCs\|dTs\|o5mCs\|oGs\|LGs\|oG] |
| 87 | [oAs\|oAs\|oAs\|oTs\|dAs\|dTs\|dTs\|dGs\|dAs\|dGs\|5mCs\|dTs\|5mCs\|dTs\|o5mCs\|LGs\|oGs\|oG] |
| 88 | [oAs\|LAs\|oAs\|oTs\|dAs\|dTs\|dTs\|dGs\|dAs\|dGs\|5mCs\|dTs\|5mCs\|dTs\|o5mCs\|oGs\|oG] |
| 89 | [oAs\|oAs\|LAs\|oTs\|dAs\|dTs\|dTs\|dGs\|dAs\|dGs\|5mCs\|dTs\|5mCs\|dTs\|o5mCs\|oGs\|oG] |
| 90 | [oAs\|oAs\|oAs\|oTs\|dAs\|dTs\|dTs\|dGs\|dAs\|dGs\|5mCs\|dTs\|5mCs\|dTs\|o5mCs\|LGs\|oG] |
| 91 | [oTs\|oAs\|oAs\|oAs\|oTs\|oAs\|oTs\|oTs\|dGs\|dAs\|dGs\|5mCs\|dTs\|5mCs\|dTs\|5mCs\|dGs\|dGs\|oGs\|o5mC] |
| 92 | [oTs\|oAs\|dAs\|dAs\|dTs\|dAs\|dTs\|dTs\|dGs\|dAs\|dGs\|5mCs\|oTs\|o5mCs\|oTs\|o5mCs\|oGs\|oGs\|oGs\|o5mC] |
| 93 | [oTs\|oAs\|oAs\|oAs\|oTs\|oAs\|oTs\|dTs\|dGs\|dAs\|dGs\|5mCs\|dTs\|5mCs\|dTs\|5mCs\|dGs\|oGs\|oGs\|o5mC] |
| 94 | [oTs\|oAs\|oAs\|dAs\|dTs\|dAs\|dTs\|dTs\|dGs\|dAs\|dGs\|5mCs\|dTs\|o5mCs\|oTs\|o5mCs\|oGs\|oGs\|oGs\|o5mC] |
| 95 | [oTs\|oAs\|oAs\|oAs\|oTs\|oAs\|oTs\|dTs\|dGs\|dAs\|dGs\|5mCs\|dTs\|5mCs\|dTs\|5mCs\|dGs\|oGs\|oG] |
| 96 | [oAs\|oAs\|dAs\|dTs\|dAs\|dTs\|dTs\|dGs\|dAs\|dGs\|5mCs\|dTs\|o5mCs\|oTs\|o5mCs\|oGs\|oGs\|oGs\|o5mC] |
| 97 | [oTs\|oAs\|oAs\|oAs\|oTs\|oAs\|dTs\|dTs\|dGs\|dAs\|dGs\|5mCs\|dTs\|5mCs\|dTs\|5mCs\|oGs\|oGs\|oGs\|o5mC] |
| 98 | [oTs\|oAs\|oAs\|oAs\|dTs\|dAs\|dTs\|dTs\|dGs\|dAs\|dGs\|5mCs\|dTs\|5mCs\|oTs\|o5mCs\|oGs\|oGs\|oGs\|o5mC] |
| 99 | [oTs\|oAs\|oAs\|oAs\|oTs\|oAs\|dTs\|dTs\|dGs\|dAs\|dGs\|5mCs\|dTs\|5mCs\|dTs\|5mCs\|oGs\|oGs\|oG] |
| 100 | [oTs\|oAs\|oAs\|dAs\|dTs\|dAs\|dTs\|dTs\|dGs\|dAs\|dGs\|5mCs\|dTs\|5mCs\|oTs\|o5mCs\|oGs\|oGs\|oGs\|o5mC] |
| 101 | [oTs\|oAs\|oAs\|oAs\|oTs\|oAs\|dTs\|dTs\|dGs\|dAs\|dGs\|5mCs\|dTs\|5mCs\|dTs\|5mCs\|oGs\|oG] |
| 102 | [oAs\|oAs\|dTs\|dAs\|dTs\|dTs\|dGs\|dAs\|dGs\|5mCs\|dTs\|5mCs\|oTs\|o5mCs\|oGs\|oGs\|oGs\|o5mC] |
| 103 | [oTs\|oAs\|oAs\|oAs\|oTs\|dAs\|dTs\|dTs\|dGs\|dAs\|dGs\|5mCs\|dTs\|5mCs\|dTs\|o5mCs\|oGs\|oGs\|oGs\|o5mC] |
| 104 | [oTs\|oAs\|oAs\|oAs\|oTs\|dAs\|dTs\|dTs\|dGs\|dAs\|dGs\|5mCs\|dTs\|5mCs\|dTs\|o5mCs\|oGs\|oGs\|oG] |
| 105 | [oTs\|oAs\|oAs\|oAs\|oTs\|dAs\|dTs\|dTs\|dGs\|dAs\|dGs\|5mCs\|dTs\|5mCs\|dTs\|o5mCs\|oGs\|oG] |
| 106 | [oAs\|oAs\|oTs\|dAs\|dTs\|dTs\|dGs\|dAs\|dGs\|5mCs\|dTs\|5mCs\|dTs\|o5mCs\|oGs\|oGs\|oGs\|o5mC] |
| 107 | [oTs\|oAs\|oAs\|oAs\|oTs\|dAs\|dTs\|dTs\|dGs\|dAs\|dGs\|5mCs\|dTs\|5mCs\|dTs\|o5mCs\|oG] |
| 108 | [oAs\|oTs\|dAs\|dTs\|dTs\|dGs\|dAs\|dGs\|5mCs\|dTs\|5mCs\|dTs\|o5mCs\|oGs\|oGs\|oGs\|o5mC] |
| 109 | [oAs\|oAs\|oAs\|oTs\|dAs\|dTs\|dTs\|dGs\|dAs\|dGs\|5mCs\|dTs\|5mCs\|dTs\|o5mCs\|oGs\|oGs\|oGs\|o5mC] |
| 110 | [oAs\|oAs\|oAs\|oTs\|dAs\|dTs\|dTs\|dGs\|dAs\|dGs\|5mCs\|dTs\|5mCs\|dTs\|o5mCs\|oGs\|oGs\|oG] |
| 111 | [oAs\|oAs\|oAs\|oTs\|dAs\|dTs\|dTs\|dGs\|dAs\|dGs\|5mCs\|dTs\|5mCs\|dTs\|o5mCs\|oGs\|oG] |
| 112 | [oTs\|oAs\|oAp\|oAs\|oTs\|dAs\|dTs\|dTs\|dGs\|dAs\|dGs\|5mCs\|dTs\|5mCs\|dTs\|o5mCs\|oGs\|oGs\|oGs\|o5mC] |
| 113 | [oTs\|oAs\|oAs\|oAp\|oTs\|dAs\|dTs\|dTs\|dGs\|dAs\|dGs\|5mCs\|dTs\|5mCs\|dTs\|o5mCs\|oGs\|oGs\|oGs\|o5mC] |
| 114 | [oTs\|oAs\|oAp\|oAp\|oTs\|dAs\|dTs\|dTs\|dGs\|dAs\|dGs\|5mCs\|dTs\|5mCs\|dTs\|o5mCs\|oGs\|oGs\|oGs\|o5mC] |
| 115 | [oTs\|oAs\|oAs\|oAs\|oTs\|dAs\|dTs\|dTs\|dGs\|dAs\|dGs\|5mCs\|dTs\|5mCs\|dTs\|o5mCs\|oGp\|oGs\|oGs\|o5mC] |
| 116 | [oTs\|oAs\|oAs\|oAs\|oTs\|dAs\|dTs\|dTs\|dGs\|dAs\|dGs\|5mCs\|dTs\|5mCs\|dTs\|o5mCp\|oGs\|oGs\|oGs\|o5mC] |
| 117 | [oTs\|oAs\|oAs\|oAs\|oTs\|dAs\|dTs\|dTs\|dGs\|dAs\|dGs\|5mCs\|dTs\|5mCs\|dTs\|o5mCp\|oGp\|oGs\|oGs\|o5mC] |
| 118 | [oTs\|oAs\|oAp\|oAs\|oTs\|dAs\|dTs\|dTs\|dGs\|dAs\|dGs\|5mCs\|dTs\|5mCs\|dTs\|o5mCs\|oGp\|oGs\|oGs\|o5mC] |
| 119 | [oTs\|oAs\|oAp\|oAs\|oTs\|dAs\|dTs\|dTs\|dGs\|dAs\|dGs\|5mCs\|dTs\|5mCs\|dTs\|o5mCp\|oGs\|oGs\|oGs\|o5mC] |
| 120 | [oTs\|oAs\|oAs\|oAp\|oTs\|dAs\|dTs\|dTs\|dGs\|dAs\|dGs\|5mCs\|dTs\|5mCs\|dTs\|o5mCs\|oGp\|oGs\|oGs\|o5mC] |
| 121 | [oTs\|oAs\|oAs\|oAp\|oTs\|dAs\|dTs\|dTs\|dGs\|dAs\|dGs\|5mCs\|dTs\|5mCs\|dTs\|o5mCp\|oGs\|oGs\|oGs\|o5mC] |
| 122 | [oTs\|oAs\|oAp\|oAs\|oTs\|dAs\|dTs\|dTs\|dGs\|dAs\|dGs\|5mCs\|dTs\|5mCs\|dTs\|o5mCp\|oGp\|oGs\|oGs\|o5mC] |
| 123 | [oTs\|oAs\|oAs\|oAp\|oTs\|dAs\|dTs\|dTs\|dGs\|dAs\|dGs\|5mCs\|dTs\|5mCs\|dTs\|o5mCp\|oGp\|oGs\|oGs\|o5mC] |
| 124 | [oTs\|oAs\|oAp\|oAp\|oTs\|dAs\|dTs\|dTs\|dGs\|dAs\|dGs\|5mCs\|dTs\|5mCs\|dTs\|o5mCs\|oGp\|oGs\|oGs\|o5mC] |
| 125 | [oTs\|oAs\|oAp\|oAp\|oTs\|dAs\|dTs\|dTs\|dGs\|dAs\|dGs\|5mCs\|dTs\|5mCs\|dTs\|o5mCp\|oGs\|oGs\|oGs\|o5mC] |
| 126 | [oTs\|oAs\|oAp\|oAp\|oTs\|dAs\|dTs\|dTs\|dGs\|dAs\|dGs\|5mCs\|dTs\|5mCs\|dTs\|o5mCp\|oGp\|oGs\|oGs\|o5mC] |
| 127 | [oTs\|oAs\|oAs\|oAs\|oTs\|dAs\|dTs\|dTs\|dGs\|dAs\|dGs\|5mCs\|dTs\|5mCs\|dTs\|o5mCs\|oGs\|oGs\|oGs\|o5mCs\|oT] |
| 128 | [oTs\|oAs\|oAp\|oAs\|oTs\|dAs\|dTs\|dTs\|dGs\|dAs\|dGs\|5mCs\|dTs\|5mCs\|dTs\|o5mCs\|oGs\|oGs\|oGs\|o5mCs\|oT] |
| 129 | [oTs\|oAs\|oAs\|oAp\|oTs\|dAs\|dTs\|dTs\|dGs\|dAs\|dGs\|5mCs\|dTs\|5mCs\|dTs\|o5mCs\|oGs\|oGs\|oGs\|o5mCs\|oT] |
| 130 | [oTs\|oAs\|oAp\|oAp\|oTs\|dAs\|dTs\|dTs\|dGs\|dAs\|dGs\|5mCs\|dTs\|5mCs\|dTs\|o5mCs\|oGs\|oGs\|oGs\|o5mCs\|oT] |
| 131 | [oTs\|oAs\|oAs\|oAs\|oTs\|dAs\|dTs\|dTs\|dGs\|dAs\|dGs\|5mCs\|dTs\|5mCs\|dTs\|o5mCs\|oGp\|oGs\|oGs\|o5mCs\|oT] |
| 132 | [oTs\|oAs\|oAs\|oAs\|oTs\|dAs\|dTs\|dTs\|dGs\|dAs\|dGs\|5mCs\|dTs\|5mCs\|dTs\|o5mCp\|oGs\|oGs\|oGs\|o5mCs\|oT] |
| 133 | [oTs\|oAs\|oAs\|oAs\|oTs\|dAs\|dTs\|dTs\|dGs\|dAs\|dGs\|5mCs\|dTs\|5mCs\|dTs\|o5mCp\|oGp\|oGs\|oGs\|o5mCs\|oT] |
| 134 | [oTs\|oAs\|oAp\|oAs\|oTs\|dAs\|dTs\|dTs\|dGs\|dAs\|dGs\|5mCs\|dTs\|5mCs\|dTs\|o5mCs\|oGp\|oGs\|oGs\|o5mCs\|oT] |
| 135 | [oTs\|oAs\|oAp\|oAs\|oTs\|dAs\|dTs\|dTs\|dGs\|dAs\|dGs\|5mCs\|dTs\|5mCs\|dTs\|o5mCp\|oGs\|oGs\|oGs\|o5mCs\|oT] |
| 136 | [oTs\|oAs\|oAs\|oAp\|oTs\|dAs\|dTs\|dTs\|dGs\|dAs\|dGs\|5mCs\|dTs\|5mCs\|dTs\|o5mCs\|oGp\|oGs\|oGs\|o5mCs\|oT] |
| 137 | [oTs\|oAs\|oAs\|oAp\|oTs\|dAs\|dTs\|dTs\|dGs\|dAs\|dGs\|5mCs\|dTs\|5mCs\|dTs\|o5mCp\|oGs\|oGs\|oGs\|o5mCs\|oT] |
| 138 | [oTs\|oAs\|oAp\|oAs\|oTs\|dAs\|dTs\|dTs\|dGs\|dAs\|dGs\|5mCs\|dTs\|5mCs\|dTs\|o5mCp\|oGp\|oGs\|oGs\|o5mCs\|oT] |
| 139 | [oTs\|oAs\|oAs\|oAp\|oTs\|dAs\|dTs\|dTs\|dGs\|dAs\|dGs\|5mCs\|dTs\|5mCs\|dTs\|o5mCp\|oGp\|oGs\|oGs\|o5mCs\|oT] |
| 140 | [oTs\|oAs\|oAp\|oAp\|oTs\|dAs\|dTs\|dTs\|dGs\|dAs\|dGs\|5mCs\|dTs\|5mCs\|dTs\|o5mCs\|oGp\|oGs\|oGs\|o5mCs\|oT] |
| 141 | [oTs\|oAs\|oAp\|oAp\|oTs\|dAs\|dTs\|dTs\|dGs\|dAs\|dGs\|5mCs\|dTs\|5mCs\|dTs\|o5mCp\|oGs\|oGs\|oGs\|o5mCs\|oT] |
| 142 | [oTs\|oAs\|oAp\|oAp\|oTs\|dAs\|dTs\|dTs\|dGs\|dAs\|dGs\|5mCs\|dTs\|5mCs\|dTs\|o5mCp\|oGp\|oGs\|oGs\|o5mCs\|oT] |
| 143 | [oTs\|oAs\|oAs\|oAs\|oTs\|dAs\|dTs\|dTs\|dGs\|dAs\|dGs\|5mCs\|dTs\|5mCs\|dTs\|o5mCs\|oGs\|oGs\|oGs\|o5mCs\|oTs\|oG] |
| 144 | [oTs\|oAs\|oAp\|oAs\|oTs\|dAs\|dTs\|dTs\|dGs\|dAs\|dGs\|5mCs\|dTs\|5mCs\|dTs\|o5mCs\|oGs\|oGs\|oGs\|o5mCs\|oTs\|oG] |
| 145 | [oTs\|oAs\|oAs\|oAp\|oTs\|dAs\|dTs\|dTs\|dGs\|dAs\|dGs\|5mCs\|dTs\|5mCs\|dTs\|o5mCs\|oGs\|oGs\|oGs\|o5mCs\|oTs\|oG] |
| 146 | [oTs\|oAs\|oAp\|oAp\|oTs\|dAs\|dTs\|dTs\|dGs\|dAs\|dGs\|5mCs\|dTs\|5mCs\|dTs\|o5mCs\|oGs\|oGs\|oGs\|o5mCs\|oTs\|oG] |
| 147 | [oTs\|oAs\|oAs\|oAs\|oTs\|dAs\|dTs\|dTs\|dGs\|dAs\|dGs\|5mCs\|dTs\|5mCs\|dTs\|o5mCs\|oGp\|oGs\|oGs\|o5mCs\|oTs\|oG] |
| 148 | [oTs\|oAs\|oAs\|oAs\|oTs\|dAs\|dTs\|dTs\|dGs\|dAs\|dGs\|5mCs\|dTs\|5mCs\|dTs\|o5mCp\|oGs\|oGs\|oGs\|o5mCs\|oTs\|oG] |
| 149 | [oTs\|oAs\|oAs\|oAs\|oTs\|dAs\|dTs\|dTs\|dGs\|dAs\|dGs\|5mCs\|dTs\|5mCs\|dTs\|o5mCp\|oGp\|oGs\|oGs\|o5mCs\|oTs\|oG] |
| 150 | [oTs\|oAs\|oAp\|oAs\|oTs\|dAs\|dTs\|dTs\|dGs\|dAs\|dGs\|5mCs\|dTs\|5mCs\|dTs\|o5mCs\|oGp\|oGs\|oGs\|o5mCs\|oTs\|oG] |
| 151 | [oTs\|oAs\|oAp\|oAs\|oTs\|dAs\|dTs\|dTs\|dGs\|dAs\|dGs\|5mCs\|dTs\|5mCs\|dTs\|o5mCp\|oGs\|oGs\|oGs\|o5mCs\|oTs\|oG] |
| 152 | [oTs\|oAs\|oAs\|oAp\|oTs\|dAs\|dTs\|dTs\|dGs\|dAs\|dGs\|5mCs\|dTs\|5mCs\|dTs\|o5mCs\|oGp\|oGs\|oGs\|o5mCs\|oTs\|oG] |
| 153 | [oTs\|oAs\|oAs\|oAp\|oTs\|dAs\|dTs\|dTs\|dGs\|dAs\|dGs\|5mCs\|dTs\|5mCs\|dTs\|o5mCp\|oGs\|oGs\|oGs\|o5mCs\|oTs\|oG] |
| 154 | [oTs\|oAs\|oAp\|oAs\|oTs\|dAs\|dTs\|dTs\|dGs\|dAs\|dGs\|5mCs\|dTs\|5mCs\|dTs\|o5mCp\|oGp\|oGs\|oGs\|o5mCs\|oTs\|oG] |
| 155 | [oTs\|oAs\|oAs\|oAp\|oTs\|dAs\|dTs\|dTs\|dGs\|dAs\|dGs\|5mCs\|dTs\|5mCs\|dTs\|o5mCp\|oGp\|oGs\|oGs\|o5mCs\|oTs\|oG] |
| 156 | [oTs\|oAs\|oAp\|oAp\|oTs\|dAs\|dTs\|dTs\|dGs\|dAs\|dGs\|5mCs\|dTs\|5mCs\|dTs\|o5mCs\|oGp\|oGs\|oGs\|o5mCs\|oTs\|oG] |
| 157 | [oTs\|oAs\|oAp\|oAp\|oTs\|dAs\|dTs\|dTs\|dGs\|dAs\|dGs\|5mCs\|dTs\|5mCs\|dTs\|o5mCp\|oGs\|oGs\|oGs\|o5mCs\|oTs\|oG] |
| 158 | [oTs\|oAs\|oAp\|oAp\|oTs\|dAs\|dTs\|dTs\|dGs\|dAs\|dGs\|5mCs\|dTs\|5mCs\|dTs\|o5mCp\|oGp\|oGs\|oGs\|o5mCs\|oTs\|oG] |
| 159 | [oTs\|oAs\|oAs\|oAs\|oTs\|dAs\|dTs\|dTs\|dGs\|dAs\|dGs\|5mCs\|dTs\|5mCs\|dTs\|o5mCs\|oGs\|oGs\|oGs\|o5mCs\|oTs\|oGs\|o5mC] |
| 160 | [oTs\|oAs\|oAp\|oAs\|oTs\|dAs\|dTs\|dTs\|dGs\|dAs\|dGs\|5mCs\|dTs\|5mCs\|dTs\|o5mCs\|oGs\|oGs\|oGs\|o5mCs\|oTs\|oGs\|o5mC] |
| 161 | [oTs\|oAs\|oAs\|oAp\|oTs\|dAs\|dTs\|dTs\|dGs\|dAs\|dGs\|5mCs\|dTs\|5mCs\|dTs\|o5mCs\|oGs\|oGs\|oGs\|o5mCs\|oTs\|oGs\|o5mC] |
| 162 | [oTs\|oAs\|oAp\|oAp\|oTs\|dAs\|dTs\|dTs\|dGs\|dAs\|dGs\|5mCs\|dTs\|5mCs\|dTs\|o5mCs\|oGs\|oGs\|oGs\|o5mCs\|oTs\|oGs\|o5mC] |
| 163 | [oTs\|oAs\|oAs\|oAs\|oTs\|dAs\|dTs\|dTs\|dGs\|dAs\|dGs\|5mCs\|dTs\|5mCs\|dTs\|o5mCs\|oGp\|oGs\|oGs\|o5mCs\|oTs\|oGs\|o5mC] |
| 164 | [oTs\|oAs\|oAs\|oAs\|oTs\|dAs\|dTs\|dTs\|dGs\|dAs\|dGs\|5mCs\|dTs\|5mCs\|dTs\|o5mCp\|oGs\|oGs\|oGs\|o5mCs\|oTs\|oGs\|o5mC] |
| 165 | [oTs\|oAs\|oAs\|oAs\|oTs\|dAs\|dTs\|dTs\|dGs\|dAs\|dGs\|5mCs\|dTs\|5mCs\|dTs\|o5mCp\|oGp\|oGs\|oGs\|o5mCs\|oTs\|oGs\|o5mC] |
| 166 | [oTs\|oAs\|oAp\|oAs\|oTs\|dAs\|dTs\|dTs\|dGs\|dAs\|dGs\|5mCs\|dTs\|5mCs\|dTs\|o5mCs\|oGp\|oGs\|oGs\|o5mCs\|oTs\|oGs\|o5mC] |
| 167 | [oTs\|oAs\|oAp\|oAs\|oTs\|dAs\|dTs\|dTs\|dGs\|dAs\|dGs\|5mCs\|dTs\|5mCs\|dTs\|o5mCp\|oGs\|oGs\|oGs\|o5mCs\|oTs\|oGs\|o5mC] |
| 168 | [oTs\|oAs\|oAs\|oAp\|oTs\|dAs\|dTs\|dTs\|dGs\|dAs\|dGs\|5mCs\|dTs\|5mCs\|dTs\|o5mCs\|oGp\|oGs\|oGs\|o5mCs\|oTs\|oGs\|o5mC] |
| 169 | [oTs\|oAs\|oAs\|oAp\|oTs\|dAs\|dTs\|dTs\|dGs\|dAs\|dGs\|5mCs\|dTs\|5mCs\|dTs\|o5mCp\|oGs\|oGs\|oGs\|o5mCs\|oTs\|oGs\|o5mC] |
| 170 | [oTs\|oAs\|oAp\|oAs\|oTs\|dAs\|dTs\|dTs\|dGs\|dAs\|dGs\|5mCs\|dTs\|5mCs\|dTs\|o5mCp\|oGp\|oGs\|oGs\|o5mCs\|oTs\|oGs\|o5mC] |
| 171 | [oTs\|oAs\|oAs\|oAp\|oTs\|dAs\|dTs\|dTs\|dGs\|dAs\|dGs\|5mCs\|dTs\|5mCs\|dTs\|o5mCp\|oGp\|oGs\|oGs\|o5mCs\|oTs\|oGs\|o5mC] |
| 172 | [oTs\|oAs\|oAp\|oAp\|oTs\|dAs\|dTs\|dTs\|dGs\|dAs\|dGs\|5mCs\|dTs\|5mCs\|dTs\|o5mCs\|oGp\|oGs\|oGs\|o5mCs\|oTs\|oGs\|o5mC] |
| 173 | [oTs\|oAs\|oAp\|oAp\|oTs\|dAs\|dTs\|dTs\|dGs\|dAs\|dGs\|5mCs\|dTs\|5mCs\|dTs\|o5mCp\|oGs\|oGs\|oGs\|o5mCs\|oTs\|oGs\|o5mC] |
| 174 | [oTs\|oAs\|oAp\|oAp\|oTs\|dAs\|dTs\|dTs\|dGs\|dAs\|dGs\|5mCs\|dTs\|5mCs\|dTs\|o5mCp\|oGp\|oGs\|oGs\|o5mCs\|oTs\|oGs\|o5mC] |
| 175 | [oTs\|oAs\|oAs\|oAs\|oTs\|dAs\|dTs\|dTs\|dGs\|dAs\|dGs\|5mCs\|dTs\|5mCs\|dTs\|5mCs\|oGs\|oGs\|oGs\|o5mCs\|oT] |
| 176 | [oTs\|oAs\|oAp\|oAs\|oTs\|dAs\|dTs\|dTs\|dGs\|dAs\|dGs\|5mCs\|dTs\|5mCs\|dTs\|5mCs\|oGs\|oGs\|oGs\|o5mCs\|oT] |
| 177 | [oTs\|oAs\|oAs\|oAp\|oTs\|dAs\|dTs\|dTs\|dGs\|dAs\|dGs\|5mCs\|dTs\|5mCs\|dTs\|5mCs\|oGs\|oGs\|oGs\|o5mCs\|oT] |
| 178 | [oTs\|oAs\|oAp\|oAp\|oTs\|dAs\|dTs\|dTs\|dGs\|dAs\|dGs\|5mCs\|dTs\|5mCs\|dTs\|5mCs\|oGs\|oGs\|oGs\|o5mCs\|oT] |
| 179 | [oTs\|oAs\|oAs\|oAs\|oTs\|dAs\|dTs\|dTs\|dGs\|dAs\|dGs\|5mCs\|dTs\|5mCs\|dTs\|5mCs\|oGp\|oGs\|oGs\|o5mCs\|oT] |
| 180 | [oTs\|oAs\|oAs\|oAs\|oTs\|dAs\|dTs\|dTs\|dGs\|dAs\|dGs\|5mCs\|dTs\|5mCs\|dTs\|5mCp\|oGs\|oGs\|oGs\|o5mCs\|oT] |
| 181 | [oTs\|oAs\|oAs\|oAs\|oTs\|dAs\|dTs\|dTs\|dGs\|dAs\|dGs\|5mCs\|dTs\|5mCs\|dTs\|5mCp\|oGp\|oGs\|oGs\|o5mCs\|oT] |
| 182 | [oTs\|oAs\|oAp\|oAs\|oTs\|dAs\|dTs\|dTs\|dGs\|dAs\|dGs\|5mCs\|dTs\|5mCs\|dTs\|5mCs\|oGp\|oGs\|oGs\|o5mCs\|oT] |
| 183 | [oTs\|oAs\|oAp\|oAs\|oTs\|dAs\|dTs\|dTs\|dGs\|dAs\|dGs\|5mCs\|dTs\|5mCs\|dTs\|5mCp\|oGs\|oGs\|oGs\|o5mCs\|oT] |
| 184 | [oTs\|oAs\|oAs\|oAp\|oTs\|dAs\|dTs\|dTs\|dGs\|dAs\|dGs\|5mCs\|dTs\|5mCs\|dTs\|5mCs\|oGp\|oGs\|oGs\|o5mCs\|oT] |
| 185 | [oTs\|oAs\|oAs\|oAp\|oTs\|dAs\|dTs\|dTs\|dGs\|dAs\|dGs\|5mCs\|dTs\|5mCs\|dTs\|5mCp\|oGs\|oGs\|oGs\|o5mCs\|oT] |
| 186 | [oTs\|oAs\|oAp\|oAs\|oTs\|dAs\|dTs\|dTs\|dGs\|dAs\|dGs\|5mCs\|dTs\|5mCs\|dTs\|5mCp\|oGp\|oGs\|oGs\|o5mCs\|oT] |
| 187 | [oTs\|oAs\|oAs\|oAp\|oTs\|dAs\|dTs\|dTs\|dGs\|dAs\|dGs\|5mCs\|dTs\|5mCs\|dTs\|5mCp\|oGp\|oGs\|oGs\|o5mCs\|oT] |
| 188 | [oTs\|oAs\|oAp\|oAp\|oTs\|dAs\|dTs\|dTs\|dGs\|dAs\|dGs\|5mCs\|dTs\|5mCs\|dTs\|5mCs\|oGp\|oGs\|oGs\|o5mCs\|oT] |
| 189 | [oTs\|oAs\|oAp\|oAp\|oTs\|dAs\|dTs\|dTs\|dGs\|dAs\|dGs\|5mCs\|dTs\|5mCs\|dTs\|5mCp\|oGs\|oGs\|oGs\|o5mCs\|oT] |
| 190 | [oTs\|oAs\|oAp\|oAp\|oTs\|dAs\|dTs\|dTs\|dGs\|dAs\|dGs\|5mCs\|dTs\|5mCs\|dTs\|5mCp\|oGp\|oGs\|oGs\|o5mCs\|oT] |
| 191 | [oTs\|oAs\|oAs\|oAs\|oTs\|dAs\|dTs\|dTs\|dGs\|dAs\|dGs\|5mCs\|dTs\|5mCs\|dTs\|5mCs\|dGs\|oGs\|oGs\|o5mCs\|oTs\|oG] |
| 192 | [oTs\|oAs\|oAp\|oAs\|oTs\|dAs\|dTs\|dTs\|dGs\|dAs\|dGs\|5mCs\|dTs\|5mCs\|dTs\|5mCs\|dGs\|oGs\|oGs\|o5mCs\|oTs\|oG] |
| 193 | [oTs\|oAs\|oAs\|oAp\|oTs\|dAs\|dTs\|dTs\|dGs\|dAs\|dGs\|5mCs\|dTs\|5mCs\|dTs\|5mCs\|dGs\|oGs\|oGs\|o5mCs\|oTs\|oG] |
| 194 | [oTs\|oAs\|oAp\|oAp\|oTs\|dAs\|dTs\|dTs\|dGs\|dAs\|dGs\|5mCs\|dTs\|5mCs\|dTs\|5mCs\|dGs\|oGs\|oGs\|o5mCs\|oTs\|oG] |
| 195 | [oTs\|oAs\|oAs\|oAs\|oTs\|dAs\|dTs\|dTs\|dGs\|dAs\|dGs\|5mCs\|dTs\|5mCs\|dTs\|5mCs\|dGp\|oGs\|oGs\|o5mCs\|oTs\|oG] |
| 196 | [oTs\|oAs\|oAs\|oAs\|oTs\|dAs\|dTs\|dTs\|dGs\|dAs\|dGs\|5mCs\|dTs\|5mCs\|dTs\|5mCp\|dGs\|oGs\|oGs\|o5mCs\|oTs\|oG] |
| 197 | [oTs\|oAs\|oAs\|oAs\|oTs\|dAs\|dTs\|dTs\|dGs\|dAs\|dGs\|5mCs\|dTs\|5mCs\|dTs\|5mCp\|dGp\|oGs\|oGs\|o5mCs\|oTs\|oG] |
| 198 | [oTs\|oAs\|oAp\|oAs\|oTs\|dAs\|dTs\|dTs\|dGs\|dAs\|dGs\|5mCs\|dTs\|5mCs\|dTs\|5mCs\|dGp\|oGs\|oGs\|o5mCs\|oTs\|oG] |
| 199 | [oTs\|oAs\|oAp\|oAs\|oTs\|dAs\|dTs\|dTs\|dGs\|dAs\|dGs\|5mCs\|dTs\|5mCs\|dTs\|5mCp\|dGs\|oGs\|oGs\|o5mCs\|oTs\|oG] |
| 200 | [oTs\|oAs\|oAs\|oAp\|oTs\|dAs\|dTs\|dTs\|dGs\|dAs\|dGs\|5mCs\|dTs\|5mCs\|dTs\|5mCs\|dGp\|oGs\|oGs\|o5mCs\|oTs\|oG] |
| 201 | [oTs\|oAs\|oAs\|oAp\|oTs\|dAs\|dTs\|dTs\|dGs\|dAs\|dGs\|5mCs\|dTs\|5mCs\|dTs\|5mCp\|dGs\|oGs\|oGs\|o5mCs\|oTs\|oG] |
| 202 | [oTs\|oAs\|oAp\|oAs\|oTs\|dAs\|dTs\|dTs\|dGs\|dAs\|dGs\|5mCs\|dTs\|5mCs\|dTs\|5mCp\|dGp\|oGs\|oGs\|o5mCs\|oTs\|oG] |
| 203 | [oTs\|oAs\|oAs\|oAp\|oTs\|dAs\|dTs\|dTs\|dGs\|dAs\|dGs\|5mCs\|dTs\|5mCs\|dTs\|5mCp\|dGp\|oGs\|oGs\|o5mCs\|oTs\|oG] |
| 204 | [oTs\|oAs\|oAp\|oAp\|oTs\|dAs\|dTs\|dTs\|dGs\|dAs\|dGs\|5mCs\|dTs\|5mCs\|dTs\|5mCs\|dGp\|oGs\|oGs\|o5mCs\|oTs\|oG] |
| 205 | [oTs\|oAs\|oAp\|oAp\|oTs\|dAs\|dTs\|dTs\|dGs\|dAs\|dGs\|5mCs\|dTs\|5mCs\|dTs\|5mCp\|dGs\|oGs\|oGs\|o5mCs\|oTs\|oG] |
| 206 | [oTs\|oAs\|oAp\|oAp\|oTs\|dAs\|dTs\|dTs\|dGs\|dAs\|dGs\|5mCs\|dTs\|5mCs\|dTs\|5mCp\|dGp\|oGs\|oGs\|o5mCs\|oTs\|oG] |
| 207 | [oAs\|LAs\|oAs\|o5mCs\|oAs\|oGs\|oTs\|o5mCs\|dTs\|dGs\|dTs\|dGs\|dAs\|dGs\|dTs\|dAs\|dGs\|dGs\|oTs\|oA] |
| 208 | [oAs\|oAs\|LAs\|o5mCs\|oAs\|oGs\|oTs\|o5mCs\|dTs\|dGs\|dTs\|dGs\|dAs\|dGs\|dTs\|dAs\|dGs\|dGs\|oTs\|oA] |
| 209 | [oAs\|oAs\|oAs\|L5mCs\|oAs\|oGs\|oTs\|o5mCs\|dTs\|dGs\|dTs\|dGs\|dAs\|dGs\|dTs\|dAs\|dGs\|dGs\|oTs\|oA] |
| 210 | [oAs\|oAs\|oAs\|o5mCs\|LAs\|oGs\|oTs\|o5mCs\|dTs\|dGs\|dTs\|dGs\|dAs\|dGs\|dTs\|dAs\|dGs\|dGs\|oTs\|oA] |
| 211 | [oAs\|oAs\|oAs\|o5mCs\|oAs\|LGs\|oTs\|o5mCs\|dTs\|dGs\|dTs\|dGs\|dAs\|dGs\|dTs\|dAs\|dGs\|dGs\|oTs\|oA] |
| 212 | [oAs\|oAs\|oAs\|o5mCs\|oAs\|oGs\|LTs\|o5mCs\|dTs\|dGs\|dTs\|dGs\|dAs\|dGs\|dTs\|dAs\|dGs\|dGs\|oTs\|oA] |
| 213 | [oAs\|oAs\|dAs\|5mCs\|dAs\|dGs\|dTs\|5mCs\|dTs\|dGs\|dTs\|dGs\|oAs\|oGs\|oTs\|oAs\|oGs\|oGs\|LTs\|oA] |
| 214 | [oAs\|oAs\|dAs\|5mCs\|dAs\|dGs\|dTs\|5mCs\|dTs\|dGs\|dTs\|dGs\|oAs\|oGs\|oTs\|oAs\|oGs\|LGs\|oTs\|oA] |
| 215 | [oAs\|oAs\|dAs\|5mCs\|dAs\|dGs\|dTs\|5mCs\|dTs\|dGs\|dTs\|dGs\|oAs\|oGs\|oTs\|oAs\|LGs\|oGs\|oTs\|oA] |
| 216 | [oAs\|oAs\|dAs\|5mCs\|dAs\|dGs\|dTs\|5mCs\|dTs\|dGs\|dTs\|dGs\|oAs\|oGs\|oTs\|LAs\|oGs\|oGs\|oTs\|oA] |
| 217 | [oAs\|oAs\|dAs\|5mCs\|dAs\|dGs\|dTs\|5mCs\|dTs\|dGs\|dTs\|dGs\|oAs\|oGs\|LTs\|oAs\|oGs\|oGs\|oTs\|oA] |
| 218 | [oAs\|oAs\|dAs\|5mCs\|dAs\|dGs\|dTs\|5mCs\|dTs\|dGs\|dTs\|dGs\|oAs\|LGs\|oTs\|oAs\|oGs\|oGs\|oTs\|oA] |
| 219 | [oAs\|LAs\|oAs\|o5mCs\|oAs\|oGs\|oTs\|5mCs\|dTs\|dGs\|dTs\|dGs\|dAs\|dGs\|dTs\|dAs\|dGs\|oGs\|oTs\|oA] |
| 220 | [oAs\|oAs\|LAs\|o5mCs\|oAs\|oGs\|oTs\|5mCs\|dTs\|dGs\|dTs\|dGs\|dAs\|dGs\|dTs\|dAs\|dGs\|oGs\|oTs\|oA] |
| 221 | [oAs\|oAs\|oAs\|L5mCs\|oAs\|oGs\|oTs\|5mCs\|dTs\|dGs\|dTs\|dGs\|dAs\|dGs\|dTs\|dAs\|dGs\|oGs\|oTs\|oA] |
| 222 | [oAs\|oAs\|oAs\|o5mCs\|LAs\|oGs\|oTs\|5mCs\|dTs\|dGs\|dTs\|dGs\|dAs\|dGs\|dTs\|dAs\|dGs\|oGs\|oTs\|oA] |
| 223 | [oAs\|oAs\|oAs\|o5mCs\|oAs\|LGs\|oTs\|5mCs\|dTs\|dGs\|dTs\|dGs\|dAs\|dGs\|dTs\|dAs\|dGs\|oGs\|oTs\|oA] |
| 224 | [oAs\|oAs\|oAs\|5mCs\|dAs\|dGs\|dTs\|5mCs\|dTs\|dGs\|dTs\|dGs\|dAs\|oGs\|oTs\|oAs\|oGs\|oGs\|LTs\|oA] |
| 225 | [oAs\|oAs\|oAs\|5mCs\|dAs\|dGs\|dTs\|5mCs\|dTs\|dGs\|dTs\|dGs\|dAs\|oGs\|oTs\|oAs\|oGs\|LGs\|oTs\|oA] |
| 226 | [oAs\|oAs\|oAs\|5mCs\|dAs\|dGs\|dTs\|5mCs\|dTs\|dGs\|dTs\|dGs\|dAs\|oGs\|oTs\|oAs\|LGs\|oGs\|oTs\|oA] |
| 227 | [oAs\|oAs\|oAs\|5mCs\|dAs\|dGs\|dTs\|5mCs\|dTs\|dGs\|dTs\|dGs\|dAs\|oGs\|oTs\|LAs\|oGs\|oGs\|oTs\|oA] |
| 228 | [oAs\|oAs\|oAs\|5mCs\|dAs\|dGs\|dTs\|5mCs\|dTs\|dGs\|dTs\|dGs\|dAs\|oGs\|LTs\|oAs\|oGs\|oGs\|oTs\|oA] |
| 229 | [oAs\|LAs\|oAs\|o5mCs\|oAs\|oGs\|oTs\|5mCs\|dTs\|dGs\|dTs\|dGs\|dAs\|dGs\|dTs\|dAs\|dGs\|oGs\|oT] |
| 230 | [oAs\|oAs\|LAs\|o5mCs\|oAs\|oGs\|oTs\|5mCs\|dTs\|dGs\|dTs\|dGs\|dAs\|dGs\|dTs\|dAs\|dGs\|oGs\|oT] |
| 231 | [oAs\|oAs\|oAs\|L5mCs\|oAs\|oGs\|oTs\|5mCs\|dTs\|dGs\|dTs\|dGs\|dAs\|dGs\|dTs\|dAs\|dGs\|oGs\|oT] |
| 232 | [oAs\|oAs\|oAs\|o5mCs\|LAs\|oGs\|oTs\|5mCs\|dTs\|dGs\|dTs\|dGs\|dAs\|dGs\|dTs\|dAs\|dGs\|oGs\|oT] |
| 233 | [oAs\|oAs\|oAs\|o5mCs\|oAs\|LGs\|oTs\|5mCs\|dTs\|dGs\|dTs\|dGs\|dAs\|dGs\|dTs\|dAs\|dGs\|oGs\|oT] |
| 234 | [oAs\|oAs\|5mCs\|dAs\|dGs\|dTs\|5mCs\|dTs\|dGs\|dTs\|dGs\|dAs\|oGs\|oTs\|oAs\|oGs\|oGs\|LTs\|oA] |
| 235 | [oAs\|oAs\|5mCs\|dAs\|dGs\|dTs\|5mCs\|dTs\|dGs\|dTs\|dGs\|dAs\|oGs\|oTs\|oAs\|oGs\|LGs\|oTs\|oA] |
| 236 | [oAs\|oAs\|5mCs\|dAs\|dGs\|dTs\|5mCs\|dTs\|dGs\|dTs\|dGs\|dAs\|oGs\|oTs\|oAs\|LGs\|oGs\|oTs\|oA] |
| 237 | [oAs\|oAs\|5mCs\|dAs\|dGs\|dTs\|5mCs\|dTs\|dGs\|dTs\|dGs\|dAs\|oGs\|oTs\|LAs\|oGs\|oGs\|oTs\|oA] |
| 238 | [oAs\|oAs\|5mCs\|dAs\|dGs\|dTs\|5mCs\|dTs\|dGs\|dTs\|dGs\|dAs\|oGs\|LTs\|oAs\|oGs\|oGs\|oTs\|oA] |
| 239 | [oAs\|LAs\|oAs\|o5mCs\|oAs\|oGs\|dTs\|5mCs\|dTs\|dGs\|dTs\|dGs\|dAs\|dGs\|dTs\|dAs\|oGs\|oGs\|oTs\|oA] |
| 240 | [oAs\|oAs\|LAs\|o5mCs\|oAs\|oGs\|dTs\|5mCs\|dTs\|dGs\|dTs\|dGs\|dAs\|dGs\|dTs\|dAs\|oGs\|oGs\|oTs\|oA] |
| 241 | [oAs\|oAs\|oAs\|L5mCs\|oAs\|oGs\|dTs\|5mCs\|dTs\|dGs\|dTs\|dGs\|dAs\|dGs\|dTs\|dAs\|oGs\|oGs\|oTs\|oA] |
| 242 | [oAs\|oAs\|oAs\|o5mCs\|LAs\|oGs\|dTs\|5mCs\|dTs\|dGs\|dTs\|dGs\|dAs\|dGs\|dTs\|dAs\|oGs\|oGs\|oTs\|oA] |
| 243 | [oAs\|oAs\|oAs\|o5mCs\|dAs\|dGs\|dTs\|5mCs\|dTs\|dGs\|dTs\|dGs\|dAs\|dGs\|oTs\|oAs\|oGs\|oGs\|LTs\|oA] |
| 244 | [oAs\|oAs\|oAs\|o5mCs\|dAs\|dGs\|dTs\|5mCs\|dTs\|dGs\|dTs\|dGs\|dAs\|dGs\|oTs\|oAs\|oGs\|LGs\|oTs\|oA] |
| 245 | [oAs\|oAs\|oAs\|o5mCs\|dAs\|dGs\|dTs\|5mCs\|dTs\|dGs\|dTs\|dGs\|dAs\|dGs\|oTs\|oAs\|LGs\|oGs\|oTs\|oA] |
| 246 | [oAs\|oAs\|oAs\|o5mCs\|dAs\|dGs\|dTs\|5mCs\|dTs\|dGs\|dTs\|dGs\|dAs\|dGs\|oTs\|LAs\|oGs\|oGs\|oTs\|oA] |
| 247 | [oAs\|LAs\|oAs\|o5mCs\|oAs\|oGs\|dTs\|5mCs\|dTs\|dGs\|dTs\|dGs\|dAs\|dGs\|dTs\|dAs\|oGs\|oGs\|oT] |
| 248 | [oAs\|oAs\|LAs\|o5mCs\|oAs\|oGs\|dTs\|5mCs\|dTs\|dGs\|dTs\|dGs\|dAs\|dGs\|dTs\|dAs\|oGs\|oGs\|oT] |
| 249 | [oAs\|oAs\|oAs\|L5mCs\|oAs\|oGs\|dTs\|5mCs\|dTs\|dGs\|dTs\|dGs\|dAs\|dGs\|dTs\|dAs\|oGs\|oGs\|oT] |
| 250 | [oAs\|oAs\|oAs\|o5mCs\|LAs\|oGs\|dTs\|5mCs\|dTs\|dGs\|dTs\|dGs\|dAs\|dGs\|dTs\|dAs\|oGs\|oGs\|oT] |
| 251 | [oAs\|oAs\|oAs\|5mCs\|dAs\|dGs\|dTs\|5mCs\|dTs\|dGs\|dTs\|dGs\|dAs\|dGs\|oTs\|oAs\|oGs\|oGs\|LTs\|oA] |
| 252 | [oAs\|oAs\|oAs\|5mCs\|dAs\|dGs\|dTs\|5mCs\|dTs\|dGs\|dTs\|dGs\|dAs\|dGs\|oTs\|oAs\|oGs\|LGs\|oTs\|oA] |
| 253 | [oAs\|oAs\|oAs\|5mCs\|dAs\|dGs\|dTs\|5mCs\|dTs\|dGs\|dTs\|dGs\|dAs\|dGs\|oTs\|oAs\|LGs\|oGs\|oTs\|oA] |
| 254 | [oAs\|LAs\|oAs\|o5mCs\|oAs\|oGs\|dTs\|5mCs\|dTs\|dGs\|dTs\|dGs\|dAs\|dGs\|dTs\|dAs\|oGs\|oG] |
| 255 | [oAs\|oAs\|LAs\|o5mCs\|oAs\|oGs\|dTs\|5mCs\|dTs\|dGs\|dTs\|dGs\|dAs\|dGs\|dTs\|dAs\|oGs\|oG] |
| 256 | [oAs\|oAs\|oAs\|L5mCs\|oAs\|oGs\|dTs\|5mCs\|dTs\|dGs\|dTs\|dGs\|dAs\|dGs\|dTs\|dAs\|oGs\|oG] |
| 257 | [oAs\|oAs\|oAs\|o5mCs\|LAs\|oGs\|dTs\|5mCs\|dTs\|dGs\|dTs\|dGs\|dAs\|dGs\|dTs\|dAs\|oGs\|oG] |
| 258 | [oAs\|o5mCs\|dAs\|dGs\|dTs\|5mCs\|dTs\|dGs\|dTs\|dGs\|dAs\|dGs\|oTs\|oAs\|oGs\|oGs\|LTs\|oA] |
| 259 | [oAs\|o5mCs\|dAs\|dGs\|dTs\|5mCs\|dTs\|dGs\|dTs\|dGs\|dAs\|dGs\|oTs\|oAs\|oGs\|LGs\|oTs\|oA] |
| 260 | [oAs\|o5mCs\|dAs\|dGs\|dTs\|5mCs\|dTs\|dGs\|dTs\|dGs\|dAs\|dGs\|oTs\|oAs\|LGs\|oGs\|oTs\|oA] |
| 261 | [oAs\|o5mCs\|dAs\|dGs\|dTs\|5mCs\|dTs\|dGs\|dTs\|dGs\|dAs\|dGs\|oTs\|LAs\|oGs\|oGs\|oTs\|oA] |
| 262 | [oAs\|LAs\|oAs\|o5mCs\|oAs\|dGs\|dTs\|5mCs\|dTs\|dGs\|dTs\|dGs\|dAs\|dGs\|dTs\|oAs\|oGs\|oGs\|oTs\|oA] |
| 263 | [oAs\|oAs\|LAs\|o5mCs\|oAs\|dGs\|dTs\|5mCs\|dTs\|dGs\|dTs\|dGs\|dAs\|dGs\|dTs\|oAs\|oGs\|oGs\|oTs\|oA] |
| 264 | [oAs\|oAs\|oAs\|L5mCs\|oAs\|dGs\|dTs\|5mCs\|dTs\|dGs\|dTs\|dGs\|dAs\|dGs\|dTs\|oAs\|oGs\|oGs\|oTs\|oA] |
| 265 | [oAs\|oAs\|oAs\|o5mCs\|oAs\|dGs\|dTs\|5mCs\|dTs\|dGs\|dTs\|dGs\|dAs\|dGs\|dTs\|oAs\|oGs\|oGs\|LTs\|oA] |
| 266 | [oAs\|oAs\|oAs\|o5mCs\|oAs\|dGs\|dTs\|5mCs\|dTs\|dGs\|dTs\|dGs\|dAs\|dGs\|dTs\|oAs\|oGs\|LGs\|oTs\|oA] |
| 267 | [oAs\|oAs\|oAs\|o5mCs\|oAs\|dGs\|dTs\|5mCs\|dTs\|dGs\|dTs\|dGs\|dAs\|dGs\|dTs\|oAs\|LGs\|oGs\|oTs\|oA] |
| 268 | [oAs\|LAs\|oAs\|o5mCs\|oAs\|dGs\|dTs\|5mCs\|dTs\|dGs\|dTs\|dGs\|dAs\|dGs\|dTs\|oAs\|oGs\|oGs\|oT] |
| 269 | [oAs\|oAs\|LAs\|o5mCs\|oAs\|dGs\|dTs\|5mCs\|dTs\|dGs\|dTs\|dGs\|dAs\|dGs\|dTs\|oAs\|oGs\|oGs\|oT] |
| 270 | [oAs\|oAs\|oAs\|L5mCs\|oAs\|dGs\|dTs\|5mCs\|dTs\|dGs\|dTs\|dGs\|dAs\|dGs\|dTs\|oAs\|oGs\|oGs\|oT] |
| 271 | [oAs\|oAs\|o5mCs\|oAs\|dGs\|dTs\|5mCs\|dTs\|dGs\|dTs\|dGs\|dAs\|dGs\|dTs\|oAs\|oGs\|oGs\|LTs\|oA] |
| 272 | [oAs\|oAs\|o5mCs\|oAs\|dGs\|dTs\|5mCs\|dTs\|dGs\|dTs\|dGs\|dAs\|dGs\|dTs\|oAs\|oGs\|LGs\|oTs\|oA] |
| 273 | [oAs\|oAs\|o5mCs\|oAs\|dGs\|dTs\|5mCs\|dTs\|dGs\|dTs\|dGs\|dAs\|dGs\|dTs\|oAs\|LGs\|oGs\|oTs\|oA] |
| 274 | [oAs\|LAs\|oAs\|o5mCs\|oAs\|dGs\|dTs\|5mCs\|dTs\|dGs\|dTs\|dGs\|dAs\|dGs\|dTs\|oAs\|oGs\|oG] |
| 275 | [oAs\|oAs\|LAs\|o5mCs\|oAs\|dGs\|dTs\|5mCs\|dTs\|dGs\|dTs\|dGs\|dAs\|dGs\|dTs\|oAs\|oGs\|oG] |
| 276 | [oAs\|oAs\|oAs\|L5mCs\|oAs\|dGs\|dTs\|5mCs\|dTs\|dGs\|dTs\|dGs\|dAs\|dGs\|dTs\|oAs\|oGs\|oG] |
| 277 | [oAs\|o5mCs\|oAs\|dGs\|dTs\|5mCs\|dTs\|dGs\|dTs\|dGs\|dAs\|dGs\|dTs\|oAs\|oGs\|oGs\|LTs\|oA] |
| 278 | [oAs\|o5mCs\|oAs\|dGs\|dTs\|5mCs\|dTs\|dGs\|dTs\|dGs\|dAs\|dGs\|dTs\|oAs\|oGs\|LGs\|oTs\|oA] |
| 279 | [oAs\|o5mCs\|oAs\|dGs\|dTs\|5mCs\|dTs\|dGs\|dTs\|dGs\|dAs\|dGs\|dTs\|oAs\|LGs\|oGs\|oTs\|oA] |
| 280 | [oAs\|LAs\|oAs\|o5mCs\|oAs\|dGs\|dTs\|5mCs\|dTs\|dGs\|dTs\|dGs\|dAs\|dGs\|dTs\|oAs\|oG] |
| 281 | [oAs\|oAs\|LAs\|o5mCs\|oAs\|dGs\|dTs\|5mCs\|dTs\|dGs\|dTs\|dGs\|dAs\|dGs\|dTs\|oAs\|oG] |
| 282 | [oAs\|oAs\|oAs\|L5mCs\|oAs\|dGs\|dTs\|5mCs\|dTs\|dGs\|dTs\|dGs\|dAs\|dGs\|dTs\|oAs\|oG] |
| 283 | [o5mCs\|oAs\|dGs\|dTs\|5mCs\|dTs\|dGs\|dTs\|dGs\|dAs\|dGs\|dTs\|oAs\|oGs\|oGs\|LTs\|oA] |
| 284 | [o5mCs\|oAs\|dGs\|dTs\|5mCs\|dTs\|dGs\|dTs\|dGs\|dAs\|dGs\|dTs\|oAs\|oGs\|LGs\|oTs\|oA] |
| 285 | [o5mCs\|oAs\|dGs\|dTs\|5mCs\|dTs\|dGs\|dTs\|dGs\|dAs\|dGs\|dTs\|oAs\|LGs\|oGs\|oTs\|oA] |
| 286 | [oAs\|LAs\|o5mCs\|oAs\|dGs\|dTs\|5mCs\|dTs\|dGs\|dTs\|dGs\|dAs\|dGs\|dTs\|oAs\|oGs\|oGs\|oTs\|oA] |
| 287 | [oAs\|oAs\|L5mCs\|oAs\|dGs\|dTs\|5mCs\|dTs\|dGs\|dTs\|dGs\|dAs\|dGs\|dTs\|oAs\|oGs\|oGs\|oTs\|oA] |
| 288 | [oAs\|oAs\|oAs\|o5mCs\|oAs\|dGs\|dTs\|5mCs\|dTs\|dGs\|dTs\|dGs\|dAs\|dGs\|dTs\|oAs\|oGs\|LGs\|oT] |
| 289 | [oAs\|oAs\|oAs\|o5mCs\|oAs\|dGs\|dTs\|5mCs\|dTs\|dGs\|dTs\|dGs\|dAs\|dGs\|dTs\|oAs\|LGs\|oGs\|oT] |
| 290 | [oAs\|LAs\|o5mCs\|oAs\|dGs\|dTs\|5mCs\|dTs\|dGs\|dTs\|dGs\|dAs\|dGs\|dTs\|oAs\|oGs\|oGs\|oT] |
| 291 | [oAs\|oAs\|L5mCs\|oAs\|dGs\|dTs\|5mCs\|dTs\|dGs\|dTs\|dGs\|dAs\|dGs\|dTs\|oAs\|oGs\|oGs\|oT] |
| 292 | [oAs\|oAs\|o5mCs\|oAs\|dGs\|dTs\|5mCs\|dTs\|dGs\|dTs\|dGs\|dAs\|dGs\|dTs\|oAs\|oGs\|LGs\|oT] |
| 293 | [oAs\|oAs\|o5mCs\|oAs\|dGs\|dTs\|5mCs\|dTs\|dGs\|dTs\|dGs\|dAs\|dGs\|dTs\|oAs\|LGs\|oGs\|oT] |
| 294 | [oAs\|LAs\|o5mCs\|oAs\|dGs\|dTs\|5mCs\|dTs\|dGs\|dTs\|dGs\|dAs\|dGs\|dTs\|oAs\|oGs\|oG] |
| 295 | [oAs\|oAs\|L5mCs\|oAs\|dGs\|dTs\|5mCs\|dTs\|dGs\|dTs\|dGs\|dAs\|dGs\|dTs\|oAs\|oGs\|oG] |
| 296 | [oAs\|oAs\|o5mCs\|oAs\|dGs\|dTs\|5mCs\|dTs\|dGs\|dTs\|dGs\|dAs\|dGs\|dTs\|oAs\|LGs\|oG] |
| 297 | [oAs\|oAs\|oAs\|o5mCs\|oAs\|oGs\|oTs\|o5mCs\|dTs\|dGs\|dTs\|dGs\|dAs\|dGs\|dTs\|dAs\|dGs\|dGs\|oTs\|oA] |
| 298 | [oAs\|oAs\|dAs\|5mCs\|dAs\|dGs\|dTs\|5mCs\|dTs\|dGs\|dTs\|dGs\|oAs\|oGs\|oTs\|oAs\|oGs\|oGs\|oTs\|oA] |
| 299 | [oAs\|oAs\|oAs\|o5mCs\|oAs\|oGs\|oTs\|5mCs\|dTs\|dGs\|dTs\|dGs\|dAs\|dGs\|dTs\|dAs\|dGs\|oGs\|oTs\|oA] |
| 300 | [oAs\|oAs\|oAs\|5mCs\|dAs\|dGs\|dTs\|5mCs\|dTs\|dGs\|dTs\|dGs\|dAs\|oGs\|oTs\|oAs\|oGs\|oGs\|oTs\|oA] |
| 301 | [oAs\|oAs\|oAs\|o5mCs\|oAs\|oGs\|oTs\|5mCs\|dTs\|dGs\|dTs\|dGs\|dAs\|dGs\|dTs\|dAs\|dGs\|oGs\|oT] |
| 302 | [oAs\|oAs\|5mCs\|dAs\|dGs\|dTs\|5mCs\|dTs\|dGs\|dTs\|dGs\|dAs\|oGs\|oTs\|oAs\|oGs\|oGs\|oTs\|oA] |
| 303 | [oAs\|oAs\|oAs\|o5mCs\|oAs\|oGs\|dTs\|5mCs\|dTs\|dGs\|dTs\|dGs\|dAs\|dGs\|dTs\|dAs\|oGs\|oGs\|oTs\|oA] |
| 304 | [oAs\|oAs\|oAs\|o5mCs\|dAs\|dGs\|dTs\|5mCs\|dTs\|dGs\|dTs\|dGs\|dAs\|dGs\|oTs\|oAs\|oGs\|oGs\|oTs\|oA] |
| 305 | [oAs\|oAs\|oAs\|o5mCs\|oAs\|oGs\|dTs\|5mCs\|dTs\|dGs\|dTs\|dGs\|dAs\|dGs\|dTs\|dAs\|oGs\|oGs\|oT] |
| 306 | [oAs\|oAs\|oAs\|5mCs\|dAs\|dGs\|dTs\|5mCs\|dTs\|dGs\|dTs\|dGs\|dAs\|dGs\|oTs\|oAs\|oGs\|oGs\|oTs\|oA] |
| 307 | [oAs\|oAs\|oAs\|o5mCs\|oAs\|oGs\|dTs\|5mCs\|dTs\|dGs\|dTs\|dGs\|dAs\|dGs\|dTs\|dAs\|oGs\|oG] |
| 308 | [oAs\|o5mCs\|dAs\|dGs\|dTs\|5mCs\|dTs\|dGs\|dTs\|dGs\|dAs\|dGs\|oTs\|oAs\|oGs\|oGs\|oTs\|oA] |
| 309 | [oAs\|oAs\|oAs\|o5mCs\|oAs\|dGs\|dTs\|5mCs\|dTs\|dGs\|dTs\|dGs\|dAs\|dGs\|dTs\|oAs\|oGs\|oGs\|oTs\|oA] |
| 310 | [oAs\|oAs\|oAs\|o5mCs\|oAs\|dGs\|dTs\|5mCs\|dTs\|dGs\|dTs\|dGs\|dAs\|dGs\|dTs\|oAs\|oGs\|oGs\|oT] |
| 311 | [oAs\|oAs\|oAs\|o5mCs\|oAs\|dGs\|dTs\|5mCs\|dTs\|dGs\|dTs\|dGs\|dAs\|dGs\|dTs\|oAs\|oGs\|oG] |
| 312 | [oAs\|o5mCs\|oAs\|dGs\|dTs\|5mCs\|dTs\|dGs\|dTs\|dGs\|dAs\|dGs\|dTs\|oAs\|oGs\|oGs\|oTs\|oA] |
| 313 | [oAs\|oAs\|oAs\|o5mCs\|oAs\|dGs\|dTs\|5mCs\|dTs\|dGs\|dTs\|dGs\|dAs\|dGs\|dTs\|oAs\|oG] |
| 314 | [o5mCs\|oAs\|dGs\|dTs\|5mCs\|dTs\|dGs\|dTs\|dGs\|dAs\|dGs\|dTs\|oAs\|oGs\|oGs\|oTs\|oA] |
| 315 | [oAs\|oAs\|o5mCs\|oAs\|dGs\|dTs\|5mCs\|dTs\|dGs\|dTs\|dGs\|dAs\|dGs\|dTs\|oAs\|oGs\|oGs\|oTs\|oA] |
| 316 | [oAs\|oAs\|o5mCs\|oAs\|dGs\|dTs\|5mCs\|dTs\|dGs\|dTs\|dGs\|dAs\|dGs\|dTs\|oAs\|oGs\|oGs\|oT] |
| 317 | [oAs\|oAs\|o5mCs\|oAs\|dGs\|dTs\|5mCs\|dTs\|dGs\|dTs\|dGs\|dAs\|dGs\|dTs\|oAs\|oGs\|oG] |
| 318 | [oAs\|oAs\|oAp\|o5mCs\|oAs\|dGs\|dTs\|5mCs\|dTs\|dGs\|dTs\|dGs\|dAs\|dGs\|dTs\|oAs\|oGs\|oGs\|oTs\|oA] |
| 319 | [oAs\|oAs\|oAs\|o5mCp\|oAs\|dGs\|dTs\|5mCs\|dTs\|dGs\|dTs\|dGs\|dAs\|dGs\|dTs\|oAs\|oGs\|oGs\|oTs\|oA] |
| 320 | [oAs\|oAs\|oAp\|o5mCp\|oAs\|dGs\|dTs\|5mCs\|dTs\|dGs\|dTs\|dGs\|dAs\|dGs\|dTs\|oAs\|oGs\|oGs\|oTs\|oA] |
| 321 | [oAs\|oAs\|oAs\|o5mCs\|oAs\|dGs\|dTs\|5mCs\|dTs\|dGs\|dTs\|dGs\|dAs\|dGs\|dTs\|oAs\|oGp\|oGs\|oTs\|oA] |
| 322 | [oAs\|oAs\|oAs\|o5mCs\|oAs\|dGs\|dTs\|5mCs\|dTs\|dGs\|dTs\|dGs\|dAs\|dGs\|dTs\|oAp\|oGs\|oGs\|oTs\|oA] |
| 323 | [oAs\|oAs\|oAs\|o5mCs\|oAs\|dGs\|dTs\|5mCs\|dTs\|dGs\|dTs\|dGs\|dAs\|dGs\|dTs\|oAp\|oGp\|oGs\|oTs\|oA] |
| 324 | [oAs\|oAs\|oAp\|o5mCs\|oAs\|dGs\|dTs\|5mCs\|dTs\|dGs\|dTs\|dGs\|dAs\|dGs\|dTs\|oAs\|oGp\|oGs\|oTs\|oA] |
| 325 | [oAs\|oAs\|oAp\|o5mCs\|oAs\|dGs\|dTs\|5mCs\|dTs\|dGs\|dTs\|dGs\|dAs\|dGs\|dTs\|oAp\|oGs\|oGs\|oTs\|oA] |
| 326 | [oAs\|oAs\|oAs\|o5mCp\|oAs\|dGs\|dTs\|5mCs\|dTs\|dGs\|dTs\|dGs\|dAs\|dGs\|dTs\|oAs\|oGp\|oGs\|oTs\|oA] |
| 327 | [oAs\|oAs\|oAs\|o5mCp\|oAs\|dGs\|dTs\|5mCs\|dTs\|dGs\|dTs\|dGs\|dAs\|dGs\|dTs\|oAp\|oGs\|oGs\|oTs\|oA] |
| 328 | [oAs\|oAs\|oAp\|o5mCs\|oAs\|dGs\|dTs\|5mCs\|dTs\|dGs\|dTs\|dGs\|dAs\|dGs\|dTs\|oAp\|oGp\|oGs\|oTs\|oA] |
| 329 | [oAs\|oAs\|oAs\|o5mCp\|oAs\|dGs\|dTs\|5mCs\|dTs\|dGs\|dTs\|dGs\|dAs\|dGs\|dTs\|oAp\|oGp\|oGs\|oTs\|oA] |
| 330 | [oAs\|oAs\|oAp\|o5mCp\|oAs\|dGs\|dTs\|5mCs\|dTs\|dGs\|dTs\|dGs\|dAs\|dGs\|dTs\|oAs\|oGp\|oGs\|oTs\|oA] |
| 331 | [oAs\|oAs\|oAp\|o5mCp\|oAs\|dGs\|dTs\|5mCs\|dTs\|dGs\|dTs\|dGs\|dAs\|dGs\|dTs\|oAp\|oGs\|oGs\|oTs\|oA] |
| 332 | [oAs\|oAs\|oAp\|o5mCp\|oAs\|dGs\|dTs\|5mCs\|dTs\|dGs\|dTs\|dGs\|dAs\|dGs\|dTs\|oAp\|oGp\|oGs\|oTs\|oA] |
| 333 | [oAs\|oAs\|oAs\|o5mCs\|oAs\|dGs\|dTs\|5mCs\|dTs\|dGs\|dTs\|dGs\|dAs\|dGs\|dTs\|oAs\|oGs\|oGs\|oTs\|oAs\|oT] |
| 334 | [oAs\|oAs\|oAp\|o5mCs\|oAs\|dGs\|dTs\|5mCs\|dTs\|dGs\|dTs\|dGs\|dAs\|dGs\|dTs\|oAs\|oGs\|oGs\|oTs\|oAs\|oT] |
| 335 | [oAs\|oAs\|oAs\|o5mCp\|oAs\|dGs\|dTs\|5mCs\|dTs\|dGs\|dTs\|dGs\|dAs\|dGs\|dTs\|oAs\|oGs\|oGs\|oTs\|oAs\|oT] |
| 336 | [oAs\|oAs\|oAp\|o5mCp\|oAs\|dGs\|dTs\|5mCs\|dTs\|dGs\|dTs\|dGs\|dAs\|dGs\|dTs\|oAs\|oGs\|oGs\|oTs\|oAs\|oT] |
| 337 | [oAs\|oAs\|oAs\|o5mCs\|oAs\|dGs\|dTs\|5mCs\|dTs\|dGs\|dTs\|dGs\|dAs\|dGs\|dTs\|oAs\|oGp\|oGs\|oTs\|oAs\|oT] |
| 338 | [oAs\|oAs\|oAs\|o5mCs\|oAs\|dGs\|dTs\|5mCs\|dTs\|dGs\|dTs\|dGs\|dAs\|dGs\|dTs\|oAp\|oGs\|oGs\|oTs\|oAs\|oT] |
| 339 | [oAs\|oAs\|oAs\|o5mCs\|oAs\|dGs\|dTs\|5mCs\|dTs\|dGs\|dTs\|dGs\|dAs\|dGs\|dTs\|oAp\|oGp\|oGs\|oTs\|oAs\|oT] |
| 340 | [oAs\|oAs\|oAp\|o5mCs\|oAs\|dGs\|dTs\|5mCs\|dTs\|dGs\|dTs\|dGs\|dAs\|dGs\|dTs\|oAs\|oGp\|oGs\|oTs\|oAs\|oT] |
| 341 | [oAs\|oAs\|oAp\|o5mCs\|oAs\|dGs\|dTs\|5mCs\|dTs\|dGs\|dTs\|dGs\|dAs\|dGs\|dTs\|oAp\|oGs\|oGs\|oTs\|oAs\|oT] |
| 342 | [oAs\|oAs\|oAs\|o5mCp\|oAs\|dGs\|dTs\|5mCs\|dTs\|dGs\|dTs\|dGs\|dAs\|dGs\|dTs\|oAs\|oGp\|oGs\|oTs\|oAs\|oT] |
| 343 | [oAs\|oAs\|oAs\|o5mCp\|oAs\|dGs\|dTs\|5mCs\|dTs\|dGs\|dTs\|dGs\|dAs\|dGs\|dTs\|oAp\|oGs\|oGs\|oTs\|oAs\|oT] |
| 344 | [oAs\|oAs\|oAp\|o5mCs\|oAs\|dGs\|dTs\|5mCs\|dTs\|dGs\|dTs\|dGs\|dAs\|dGs\|dTs\|oAp\|oGp\|oGs\|oTs\|oAs\|oT] |
| 345 | [oAs\|oAs\|oAs\|o5mCp\|oAs\|dGs\|dTs\|5mCs\|dTs\|dGs\|dTs\|dGs\|dAs\|dGs\|dTs\|oAp\|oGp\|oGs\|oTs\|oAs\|oT] |
| 346 | [oAs\|oAs\|oAp\|o5mCp\|oAs\|dGs\|dTs\|5mCs\|dTs\|dGs\|dTs\|dGs\|dAs\|dGs\|dTs\|oAs\|oGp\|oGs\|oTs\|oAs\|oT] |
| 347 | [oAs\|oAs\|oAp\|o5mCp\|oAs\|dGs\|dTs\|5mCs\|dTs\|dGs\|dTs\|dGs\|dAs\|dGs\|dTs\|oAp\|oGs\|oGs\|oTs\|oAs\|oT] |
| 348 | [oAs\|oAs\|oAp\|o5mCp\|oAs\|dGs\|dTs\|5mCs\|dTs\|dGs\|dTs\|dGs\|dAs\|dGs\|dTs\|oAp\|oGp\|oGs\|oTs\|oAs\|oT] |
| 349 | [oAs\|oAs\|oAs\|o5mCs\|oAs\|dGs\|dTs\|5mCs\|dTs\|dGs\|dTs\|dGs\|dAs\|dGs\|dTs\|oAs\|oGs\|oGs\|oTs\|oAs\|oTs\|oA] |
| 350 | [oAs\|oAs\|oAp\|o5mCs\|oAs\|dGs\|dTs\|5mCs\|dTs\|dGs\|dTs\|dGs\|dAs\|dGs\|dTs\|oAs\|oGs\|oGs\|oTs\|oAs\|oTs\|oA] |
| 351 | [oAs\|oAs\|oAs\|o5mCp\|oAs\|dGs\|dTs\|5mCs\|dTs\|dGs\|dTs\|dGs\|dAs\|dGs\|dTs\|oAs\|oGs\|oGs\|oTs\|oAs\|oTs\|oA] |
| 352 | [oAs\|oAs\|oAp\|o5mCp\|oAs\|dGs\|dTs\|5mCs\|dTs\|dGs\|dTs\|dGs\|dAs\|dGs\|dTs\|oAs\|oGs\|oGs\|oTs\|oAs\|oTs\|oA] |
| 353 | [oAs\|oAs\|oAs\|o5mCs\|oAs\|dGs\|dTs\|5mCs\|dTs\|dGs\|dTs\|dGs\|dAs\|dGs\|dTs\|oAs\|oGp\|oGs\|oTs\|oAs\|oTs\|oA] |
| 354 | [oAs\|oAs\|oAs\|o5mCs\|oAs\|dGs\|dTs\|5mCs\|dTs\|dGs\|dTs\|dGs\|dAs\|dGs\|dTs\|oAp\|oGs\|oGs\|oTs\|oAs\|oTs\|oA] |
| 355 | [oAs\|oAs\|oAs\|o5mCs\|oAs\|dGs\|dTs\|5mCs\|dTs\|dGs\|dTs\|dGs\|dAs\|dGs\|dTs\|oAp\|oGp\|oGs\|oTs\|oAs\|oTs\|oA] |
| 356 | [oAs\|oAs\|oAp\|o5mCs\|oAs\|dGs\|dTs\|5mCs\|dTs\|dGs\|dTs\|dGs\|dAs\|dGs\|dTs\|oAs\|oGp\|oGs\|oTs\|oAs\|oTs\|oA] |
| 357 | [oAs\|oAs\|oAp\|o5mCs\|oAs\|dGs\|dTs\|5mCs\|dTs\|dGs\|dTs\|dGs\|dAs\|dGs\|dTs\|oAp\|oGs\|oGs\|oTs\|oAs\|oTs\|oA] |
| 358 | [oAs\|oAs\|oAs\|o5mCp\|oAs\|dGs\|dTs\|5mCs\|dTs\|dGs\|dTs\|dGs\|dAs\|dGs\|dTs\|oAs\|oGp\|oGs\|oTs\|oAs\|oTs\|oA] |
| 359 | [oAs\|oAs\|oAs\|o5mCp\|oAs\|dGs\|dTs\|5mCs\|dTs\|dGs\|dTs\|dGs\|dAs\|dGs\|dTs\|oAp\|oGs\|oGs\|oTs\|oAs\|oTs\|oA] |
| 360 | [oAs\|oAs\|oAp\|o5mCs\|oAs\|dGs\|dTs\|5mCs\|dTs\|dGs\|dTs\|dGs\|dAs\|dGs\|dTs\|oAp\|oGp\|oGs\|oTs\|oAs\|oTs\|oA] |
| 361 | [oAs\|oAs\|oAs\|o5mCp\|oAs\|dGs\|dTs\|5mCs\|dTs\|dGs\|dTs\|dGs\|dAs\|dGs\|dTs\|oAp\|oGp\|oGs\|oTs\|oAs\|oTs\|oA] |
| 362 | [oAs\|oAs\|oAp\|o5mCp\|oAs\|dGs\|dTs\|5mCs\|dTs\|dGs\|dTs\|dGs\|dAs\|dGs\|dTs\|oAs\|oGp\|oGs\|oTs\|oAs\|oTs\|oA] |
| 363 | [oAs\|oAs\|oAp\|o5mCp\|oAs\|dGs\|dTs\|5mCs\|dTs\|dGs\|dTs\|dGs\|dAs\|dGs\|dTs\|oAp\|oGs\|oGs\|oTs\|oAs\|oTs\|oA] |
| 364 | [oAs\|oAs\|oAp\|o5mCp\|oAs\|dGs\|dTs\|5mCs\|dTs\|dGs\|dTs\|dGs\|dAs\|dGs\|dTs\|oAp\|oGp\|oGs\|oTs\|oAs\|oTs\|oA] |
| 365 | [oAs\|oAs\|oAs\|o5mCs\|oAs\|dGs\|dTs\|5mCs\|dTs\|dGs\|dTs\|dGs\|dAs\|dGs\|dTs\|oAs\|oGs\|oGs\|oTs\|oAs\|oTs\|oAs\|o5mC] |
| 366 | [oAs\|oAs\|oAp\|o5mCs\|oAs\|dGs\|dTs\|5mCs\|dTs\|dGs\|dTs\|dGs\|dAs\|dGs\|dTs\|oAs\|oGs\|oGs\|oTs\|oAs\|oTs\|oAs\|o5mC] |
| 367 | [oAs\|oAs\|oAs\|o5mCp\|oAs\|dGs\|dTs\|5mCs\|dTs\|dGs\|dTs\|dGs\|dAs\|dGs\|dTs\|oAs\|oGs\|oGs\|oTs\|oAs\|oTs\|oAs\|o5mC] |
| 368 | [oAs\|oAs\|oAp\|o5mCp\|oAs\|dGs\|dTs\|5mCs\|dTs\|dGs\|dTs\|dGs\|dAs\|dGs\|dTs\|oAs\|oGs\|oGs\|oTs\|oAs\|oTs\|oAs\|o5mC] |
| 369 | [oAs\|oAs\|oAs\|o5mCs\|oAs\|dGs\|dTs\|5mCs\|dTs\|dGs\|dTs\|dGs\|dAs\|dGs\|dTs\|oAs\|oGp\|oGs\|oTs\|oAs\|oTs\|oAs\|o5mC] |
| 370 | [oAs\|oAs\|oAs\|o5mCs\|oAs\|dGs\|dTs\|5mCs\|dTs\|dGs\|dTs\|dGs\|dAs\|dGs\|dTs\|oAp\|oGs\|oGs\|oTs\|oAs\|oTs\|oAs\|o5mC] |
| 371 | [oAs\|oAs\|oAs\|o5mCs\|oAs\|dGs\|dTs\|5mCs\|dTs\|dGs\|dTs\|dGs\|dAs\|dGs\|dTs\|oAp\|oGp\|oGs\|oTs\|oAs\|oTs\|oAs\|o5mC] |
| 372 | [oAs\|oAs\|oAp\|o5mCs\|oAs\|dGs\|dTs\|5mCs\|dTs\|dGs\|dTs\|dGs\|dAs\|dGs\|dTs\|oAs\|oGp\|oGs\|oTs\|oAs\|oTs\|oAs\|o5mC] |
| 373 | [oAs\|oAs\|oAp\|o5mCs\|oAs\|dGs\|dTs\|5mCs\|dTs\|dGs\|dTs\|dGs\|dAs\|dGs\|dTs\|oAp\|oGs\|oGs\|oTs\|oAs\|oTs\|oAs\|o5mC] |
| 374 | [oAs\|oAs\|oAs\|o5mCp\|oAs\|dGs\|dTs\|5mCs\|dTs\|dGs\|dTs\|dGs\|dAs\|dGs\|dTs\|oAs\|oGp\|oGs\|oTs\|oAs\|oTs\|oAs\|o5mC] |
| 375 | [oAs\|oAs\|oAs\|o5mCp\|oAs\|dGs\|dTs\|5mCs\|dTs\|dGs\|dTs\|dGs\|dAs\|dGs\|dTs\|oAp\|oGs\|oGs\|oTs\|oAs\|oTs\|oAs\|o5mC] |
| 376 | [oAs\|oAs\|oAp\|o5mCs\|oAs\|dGs\|dTs\|5mCs\|dTs\|dGs\|dTs\|dGs\|dAs\|dGs\|dTs\|oAp\|oGp\|oGs\|oTs\|oAs\|oTs\|oAs\|o5mC] |
| 377 | [oAs\|oAs\|oAs\|o5mCp\|oAs\|dGs\|dTs\|5mCs\|dTs\|dGs\|dTs\|dGs\|dAs\|dGs\|dTs\|oAp\|oGp\|oGs\|oTs\|oAs\|oTs\|oAs\|o5mC] |
| 378 | [oAs\|oAs\|oAp\|o5mCp\|oAs\|dGs\|dTs\|5mCs\|dTs\|dGs\|dTs\|dGs\|dAs\|dGs\|dTs\|oAs\|oGp\|oGs\|oTs\|oAs\|oTs\|oAs\|o5mC] |
| 379 | [oAs\|oAs\|oAp\|o5mCp\|oAs\|dGs\|dTs\|5mCs\|dTs\|dGs\|dTs\|dGs\|dAs\|dGs\|dTs\|oAp\|oGs\|oGs\|oTs\|oAs\|oTs\|oAs\|o5mC] |
| 380 | [oAs\|oAs\|oAp\|o5mCp\|oAs\|dGs\|dTs\|5mCs\|dTs\|dGs\|dTs\|dGs\|dAs\|dGs\|dTs\|oAp\|oGp\|oGs\|oTs\|oAs\|oTs\|oAs\|o5mC] |
| 381 | [oAs\|oAs\|oAs\|o5mCs\|oAs\|dGs\|dTs\|5mCs\|dTs\|dGs\|dTs\|dGs\|dAs\|dGs\|dTs\|dAs\|oGs\|oGs\|oTs\|oAs\|oT] |
| 382 | [oAs\|oAs\|oAp\|o5mCs\|oAs\|dGs\|dTs\|5mCs\|dTs\|dGs\|dTs\|dGs\|dAs\|dGs\|dTs\|dAs\|oGs\|oGs\|oTs\|oAs\|oT] |
| 383 | [oAs\|oAs\|oAs\|o5mCp\|oAs\|dGs\|dTs\|5mCs\|dTs\|dGs\|dTs\|dGs\|dAs\|dGs\|dTs\|dAs\|oGs\|oGs\|oTs\|oAs\|oT] |
| 384 | [oAs\|oAs\|oAp\|o5mCp\|oAs\|dGs\|dTs\|5mCs\|dTs\|dGs\|dTs\|dGs\|dAs\|dGs\|dTs\|dAs\|oGs\|oGs\|oTs\|oAs\|oT] |
| 385 | [oAs\|oAs\|oAs\|o5mCs\|oAs\|dGs\|dTs\|5mCs\|dTs\|dGs\|dTs\|dGs\|dAs\|dGs\|dTs\|dAs\|oGp\|oGs\|oTs\|oAs\|oT] |
| 386 | [oAs\|oAs\|oAs\|o5mCs\|oAs\|dGs\|dTs\|5mCs\|dTs\|dGs\|dTs\|dGs\|dAs\|dGs\|dTs\|dAp\|oGs\|oGs\|oTs\|oAs\|oT] |
| 387 | [oAs\|oAs\|oAs\|o5mCs\|oAs\|dGs\|dTs\|5mCs\|dTs\|dGs\|dTs\|dGs\|dAs\|dGs\|dTs\|dAp\|oGp\|oGs\|oTs\|oAs\|oT] |
| 388 | [oAs\|oAs\|oAp\|o5mCs\|oAs\|dGs\|dTs\|5mCs\|dTs\|dGs\|dTs\|dGs\|dAs\|dGs\|dTs\|dAs\|oGp\|oGs\|oTs\|oAs\|oT] |
| 389 | [oAs\|oAs\|oAp\|o5mCs\|oAs\|dGs\|dTs\|5mCs\|dTs\|dGs\|dTs\|dGs\|dAs\|dGs\|dTs\|dAp\|oGs\|oGs\|oTs\|oAs\|oT] |
| 390 | [oAs\|oAs\|oAs\|o5mCp\|oAs\|dGs\|dTs\|5mCs\|dTs\|dGs\|dTs\|dGs\|dAs\|dGs\|dTs\|dAs\|oGp\|oGs\|oTs\|oAs\|oT] |
| 391 | [oAs\|oAs\|oAs\|o5mCp\|oAs\|dGs\|dTs\|5mCs\|dTs\|dGs\|dTs\|dGs\|dAs\|dGs\|dTs\|dAp\|oGs\|oGs\|oTs\|oAs\|oT] |
| 392 | [oAs\|oAs\|oAp\|o5mCs\|oAs\|dGs\|dTs\|5mCs\|dTs\|dGs\|dTs\|dGs\|dAs\|dGs\|dTs\|dAp\|oGp\|oGs\|oTs\|oAs\|oT] |
| 393 | [oAs\|oAs\|oAs\|o5mCp\|oAs\|dGs\|dTs\|5mCs\|dTs\|dGs\|dTs\|dGs\|dAs\|dGs\|dTs\|dAp\|oGp\|oGs\|oTs\|oAs\|oT] |
| 394 | [oAs\|oAs\|oAp\|o5mCp\|oAs\|dGs\|dTs\|5mCs\|dTs\|dGs\|dTs\|dGs\|dAs\|dGs\|dTs\|dAs\|oGp\|oGs\|oTs\|oAs\|oT] |
| 395 | [oAs\|oAs\|oAp\|o5mCp\|oAs\|dGs\|dTs\|5mCs\|dTs\|dGs\|dTs\|dGs\|dAs\|dGs\|dTs\|dAp\|oGs\|oGs\|oTs\|oAs\|oT] |
| 396 | [oAs\|oAs\|oAp\|o5mCp\|oAs\|dGs\|dTs\|5mCs\|dTs\|dGs\|dTs\|dGs\|dAs\|dGs\|dTs\|dAp\|oGp\|oGs\|oTs\|oAs\|oT] |
| 397 | [oAs\|oAs\|oAs\|o5mCs\|oAs\|dGs\|dTs\|5mCs\|dTs\|dGs\|dTs\|dGs\|dAs\|dGs\|dTs\|dAs\|dGs\|oGs\|oTs\|oAs\|oTs\|oA] |
| 398 | [oAs\|oAs\|oAp\|o5mCs\|oAs\|dGs\|dTs\|5mCs\|dTs\|dGs\|dTs\|dGs\|dAs\|dGs\|dTs\|dAs\|dGs\|oGs\|oTs\|oAs\|oTs\|oA] |
| 399 | [oAs\|oAs\|oAs\|o5mCp\|oAs\|dGs\|dTs\|5mCs\|dTs\|dGs\|dTs\|dGs\|dAs\|dGs\|dTs\|dAs\|dGs\|oGs\|oTs\|oAs\|oTs\|oA] |
| 400 | [oAs\|oAs\|oAp\|o5mCp\|oAs\|dGs\|dTs\|5mCs\|dTs\|dGs\|dTs\|dGs\|dAs\|dGs\|dTs\|dAs\|dGs\|oGs\|oTs\|oAs\|oTs\|oA] |
| 401 | [oAs\|oAs\|oAs\|o5mCs\|oAs\|dGs\|dTs\|5mCs\|dTs\|dGs\|dTs\|dGs\|dAs\|dGs\|dTs\|dAs\|dGp\|oGs\|oTs\|oAs\|oTs\|oA] |
| 402 | [oAs\|oAs\|oAs\|o5mCs\|oAs\|dGs\|dTs\|5mCs\|dTs\|dGs\|dTs\|dGs\|dAs\|dGs\|dTs\|dAp\|dGs\|oGs\|oTs\|oAs\|oTs\|oA] |
| 403 | [oAs\|oAs\|oAs\|o5mCs\|oAs\|dGs\|dTs\|5mCs\|dTs\|dGs\|dTs\|dGs\|dAs\|dGs\|dTs\|dAp\|dGp\|oGs\|oTs\|oAs\|oTs\|oA] |
| 404 | [oAs\|oAs\|oAp\|o5mCs\|oAs\|dGs\|dTs\|5mCs\|dTs\|dGs\|dTs\|dGs\|dAs\|dGs\|dTs\|dAs\|dGp\|oGs\|oTs\|oAs\|oTs\|oA] |
| 405 | [oAs\|oAs\|oAp\|o5mCs\|oAs\|dGs\|dTs\|5mCs\|dTs\|dGs\|dTs\|dGs\|dAs\|dGs\|dTs\|dAp\|dGs\|oGs\|oTs\|oAs\|oTs\|oA] |
| 406 | [oAs\|oAs\|oAs\|o5mCp\|oAs\|dGs\|dTs\|5mCs\|dTs\|dGs\|dTs\|dGs\|dAs\|dGs\|dTs\|dAs\|dGp\|oGs\|oTs\|oAs\|oTs\|oA] |
| 407 | [oAs\|oAs\|oAs\|o5mCp\|oAs\|dGs\|dTs\|5mCs\|dTs\|dGs\|dTs\|dGs\|dAs\|dGs\|dTs\|dAp\|dGs\|oGs\|oTs\|oAs\|oTs\|oA] |
| 408 | [oAs\|oAs\|oAp\|o5mCs\|oAs\|dGs\|dTs\|5mCs\|dTs\|dGs\|dTs\|dGs\|dAs\|dGs\|dTs\|dAp\|dGp\|oGs\|oTs\|oAs\|oTs\|oA] |
| 409 | [oAs\|oAs\|oAs\|o5mCp\|oAs\|dGs\|dTs\|5mCs\|dTs\|dGs\|dTs\|dGs\|dAs\|dGs\|dTs\|dAp\|dGp\|oGs\|oTs\|oAs\|oTs\|oA] |
| 410 | [oAs\|oAs\|oAp\|o5mCp\|oAs\|dGs\|dTs\|5mCs\|dTs\|dGs\|dTs\|dGs\|dAs\|dGs\|dTs\|dAs\|dGp\|oGs\|oTs\|oAs\|oTs\|oA] |
| 411 | [oAs\|oAs\|oAp\|o5mCp\|oAs\|dGs\|dTs\|5mCs\|dTs\|dGs\|dTs\|dGs\|dAs\|dGs\|dTs\|dAp\|dGs\|oGs\|oTs\|oAs\|oTs\|oA] |
| 412 | [oAs\|oAs\|oAp\|o5mCp\|oAs\|dGs\|dTs\|5mCs\|dTs\|dGs\|dTs\|dGs\|dAs\|dGs\|dTs\|dAp\|dGp\|oGs\|oTs\|oAs\|oTs\|oA] |
| 413 | [oTs\|L5mCs\|o5mCs\|oGs\|oGs\|oGs\|oTs\|oTs\|dTs\|5mCs\|dTs\|dAs\|dGs\|5mCs\|dTs\|5mCs\|dTs\|dGs\|oAs\|oA] |
| 414 | [oTs\|o5mCs\|L5mCs\|oGs\|oGs\|oGs\|oTs\|oTs\|dTs\|5mCs\|dTs\|dAs\|dGs\|5mCs\|dTs\|5mCs\|dTs\|dGs\|oAs\|oA] |
| 415 | [oTs\|o5mCs\|o5mCs\|LGs\|oGs\|oGs\|oTs\|oTs\|dTs\|5mCs\|dTs\|dAs\|dGs\|5mCs\|dTs\|5mCs\|dTs\|dGs\|oAs\|oA] |
| 416 | [oTs\|o5mCs\|o5mCs\|oGs\|LGs\|oGs\|oTs\|oTs\|dTs\|5mCs\|dTs\|dAs\|dGs\|5mCs\|dTs\|5mCs\|dTs\|dGs\|oAs\|oA] |
| 417 | [oTs\|o5mCs\|o5mCs\|oGs\|oGs\|LGs\|oTs\|oTs\|dTs\|5mCs\|dTs\|dAs\|dGs\|5mCs\|dTs\|5mCs\|dTs\|dGs\|oAs\|oA] |
| 418 | [oTs\|o5mCs\|o5mCs\|oGs\|oGs\|oGs\|LTs\|oTs\|dTs\|5mCs\|dTs\|dAs\|dGs\|5mCs\|dTs\|5mCs\|dTs\|dGs\|oAs\|oA] |
| 419 | [oTs\|o5mCs\|5mCs\|dGs\|dGs\|dGs\|dTs\|dTs\|dTs\|5mCs\|dTs\|dAs\|oGs\|o5mCs\|oTs\|o5mCs\|oTs\|oGs\|LAs\|oA] |
| 420 | [oTs\|o5mCs\|5mCs\|dGs\|dGs\|dGs\|dTs\|dTs\|dTs\|5mCs\|dTs\|dAs\|oGs\|o5mCs\|oTs\|o5mCs\|oTs\|LGs\|oAs\|oA] |
| 421 | [oTs\|o5mCs\|5mCs\|dGs\|dGs\|dGs\|dTs\|dTs\|dTs\|5mCs\|dTs\|dAs\|oGs\|o5mCs\|oTs\|o5mCs\|LTs\|oGs\|oAs\|oA] |
| 422 | [oTs\|o5mCs\|5mCs\|dGs\|dGs\|dGs\|dTs\|dTs\|dTs\|5mCs\|dTs\|dAs\|oGs\|o5mCs\|oTs\|L5mCs\|oTs\|oGs\|oAs\|oA] |
| 423 | [oTs\|o5mCs\|5mCs\|dGs\|dGs\|dGs\|dTs\|dTs\|dTs\|5mCs\|dTs\|dAs\|oGs\|o5mCs\|LTs\|o5mCs\|oTs\|oGs\|oAs\|oA] |
| 424 | [oTs\|o5mCs\|5mCs\|dGs\|dGs\|dGs\|dTs\|dTs\|dTs\|5mCs\|dTs\|dAs\|oGs\|L5mCs\|oTs\|o5mCs\|oTs\|oGs\|oAs\|oA] |
| 425 | [oTs\|L5mCs\|o5mCs\|oGs\|oGs\|oGs\|oTs\|dTs\|dTs\|5mCs\|dTs\|dAs\|dGs\|5mCs\|dTs\|5mCs\|dTs\|oGs\|oAs\|oA] |
| 426 | [oTs\|o5mCs\|L5mCs\|oGs\|oGs\|oGs\|oTs\|dTs\|dTs\|5mCs\|dTs\|dAs\|dGs\|5mCs\|dTs\|5mCs\|dTs\|oGs\|oAs\|oA] |
| 427 | [oTs\|o5mCs\|o5mCs\|LGs\|oGs\|oGs\|oTs\|dTs\|dTs\|5mCs\|dTs\|dAs\|dGs\|5mCs\|dTs\|5mCs\|dTs\|oGs\|oAs\|oA] |
| 428 | [oTs\|o5mCs\|o5mCs\|oGs\|LGs\|oGs\|oTs\|dTs\|dTs\|5mCs\|dTs\|dAs\|dGs\|5mCs\|dTs\|5mCs\|dTs\|oGs\|oAs\|oA] |
| 429 | [oTs\|o5mCs\|o5mCs\|oGs\|oGs\|LGs\|oTs\|dTs\|dTs\|5mCs\|dTs\|dAs\|dGs\|5mCs\|dTs\|5mCs\|dTs\|oGs\|oAs\|oA] |
| 430 | [oTs\|o5mCs\|o5mCs\|dGs\|dGs\|dGs\|dTs\|dTs\|dTs\|5mCs\|dTs\|dAs\|dGs\|o5mCs\|oTs\|o5mCs\|oTs\|oGs\|LAs\|oA] |
| 431 | [oTs\|o5mCs\|o5mCs\|dGs\|dGs\|dGs\|dTs\|dTs\|dTs\|5mCs\|dTs\|dAs\|dGs\|o5mCs\|oTs\|o5mCs\|oTs\|LGs\|oAs\|oA] |
| 432 | [oTs\|o5mCs\|o5mCs\|dGs\|dGs\|dGs\|dTs\|dTs\|dTs\|5mCs\|dTs\|dAs\|dGs\|o5mCs\|oTs\|o5mCs\|LTs\|oGs\|oAs\|oA] |
| 433 | [oTs\|o5mCs\|o5mCs\|dGs\|dGs\|dGs\|dTs\|dTs\|dTs\|5mCs\|dTs\|dAs\|dGs\|o5mCs\|oTs\|L5mCs\|oTs\|oGs\|oAs\|oA] |
| 434 | [oTs\|o5mCs\|o5mCs\|dGs\|dGs\|dGs\|dTs\|dTs\|dTs\|5mCs\|dTs\|dAs\|dGs\|o5mCs\|LTs\|o5mCs\|oTs\|oGs\|oAs\|oA] |
| 435 | [oTs\|L5mCs\|o5mCs\|oGs\|oGs\|oGs\|oTs\|dTs\|dTs\|5mCs\|dTs\|dAs\|dGs\|5mCs\|dTs\|5mCs\|dTs\|oGs\|oA] |
| 436 | [oTs\|o5mCs\|L5mCs\|oGs\|oGs\|oGs\|oTs\|dTs\|dTs\|5mCs\|dTs\|dAs\|dGs\|5mCs\|dTs\|5mCs\|dTs\|oGs\|oA] |
| 437 | [oTs\|o5mCs\|o5mCs\|LGs\|oGs\|oGs\|oTs\|dTs\|dTs\|5mCs\|dTs\|dAs\|dGs\|5mCs\|dTs\|5mCs\|dTs\|oGs\|oA] |
| 438 | [oTs\|o5mCs\|o5mCs\|oGs\|LGs\|oGs\|oTs\|dTs\|dTs\|5mCs\|dTs\|dAs\|dGs\|5mCs\|dTs\|5mCs\|dTs\|oGs\|oA] |
| 439 | [oTs\|o5mCs\|o5mCs\|oGs\|oGs\|LGs\|oTs\|dTs\|dTs\|5mCs\|dTs\|dAs\|dGs\|5mCs\|dTs\|5mCs\|dTs\|oGs\|oA] |
| 440 | [o5mCs\|o5mCs\|dGs\|dGs\|dGs\|dTs\|dTs\|dTs\|5mCs\|dTs\|dAs\|dGs\|o5mCs\|oTs\|o5mCs\|oTs\|oGs\|LAs\|oA] |
| 441 | [o5mCs\|o5mCs\|dGs\|dGs\|dGs\|dTs\|dTs\|dTs\|5mCs\|dTs\|dAs\|dGs\|o5mCs\|oTs\|o5mCs\|oTs\|LGs\|oAs\|oA] |
| 442 | [o5mCs\|o5mCs\|dGs\|dGs\|dGs\|dTs\|dTs\|dTs\|5mCs\|dTs\|dAs\|dGs\|o5mCs\|oTs\|o5mCs\|LTs\|oGs\|oAs\|oA] |
| 443 | [o5mCs\|o5mCs\|dGs\|dGs\|dGs\|dTs\|dTs\|dTs\|5mCs\|dTs\|dAs\|dGs\|o5mCs\|oTs\|L5mCs\|oTs\|oGs\|oAs\|oA] |
| 444 | [o5mCs\|o5mCs\|dGs\|dGs\|dGs\|dTs\|dTs\|dTs\|5mCs\|dTs\|dAs\|dGs\|o5mCs\|LTs\|o5mCs\|oTs\|oGs\|oAs\|oA] |
| 445 | [oTs\|L5mCs\|o5mCs\|oGs\|oGs\|oGs\|dTs\|dTs\|dTs\|5mCs\|dTs\|dAs\|dGs\|5mCs\|dTs\|5mCs\|oTs\|oGs\|oAs\|oA] |
| 446 | [oTs\|o5mCs\|L5mCs\|oGs\|oGs\|oGs\|dTs\|dTs\|dTs\|5mCs\|dTs\|dAs\|dGs\|5mCs\|dTs\|5mCs\|oTs\|oGs\|oAs\|oA] |
| 447 | [oTs\|o5mCs\|o5mCs\|LGs\|oGs\|oGs\|dTs\|dTs\|dTs\|5mCs\|dTs\|dAs\|dGs\|5mCs\|dTs\|5mCs\|oTs\|oGs\|oAs\|oA] |
| 448 | [oTs\|o5mCs\|o5mCs\|oGs\|LGs\|oGs\|dTs\|dTs\|dTs\|5mCs\|dTs\|dAs\|dGs\|5mCs\|dTs\|5mCs\|oTs\|oGs\|oAs\|oA] |
| 449 | [oTs\|o5mCs\|o5mCs\|oGs\|dGs\|dGs\|dTs\|dTs\|dTs\|5mCs\|dTs\|dAs\|dGs\|5mCs\|oTs\|o5mCs\|oTs\|oGs\|LAs\|oA] |
| 450 | [oTs\|o5mCs\|o5mCs\|oGs\|dGs\|dGs\|dTs\|dTs\|dTs\|5mCs\|dTs\|dAs\|dGs\|5mCs\|oTs\|o5mCs\|oTs\|LGs\|oAs\|oA] |
| 451 | [oTs\|o5mCs\|o5mCs\|oGs\|dGs\|dGs\|dTs\|dTs\|dTs\|5mCs\|dTs\|dAs\|dGs\|5mCs\|oTs\|o5mCs\|LTs\|oGs\|oAs\|oA] |
| 452 | [oTs\|o5mCs\|o5mCs\|oGs\|dGs\|dGs\|dTs\|dTs\|dTs\|5mCs\|dTs\|dAs\|dGs\|5mCs\|oTs\|L5mCs\|oTs\|oGs\|oAs\|oA] |
| 453 | [oTs\|L5mCs\|o5mCs\|oGs\|oGs\|oGs\|dTs\|dTs\|dTs\|5mCs\|dTs\|dAs\|dGs\|5mCs\|dTs\|5mCs\|oTs\|oGs\|oA] |
| 454 | [oTs\|o5mCs\|L5mCs\|oGs\|oGs\|oGs\|dTs\|dTs\|dTs\|5mCs\|dTs\|dAs\|dGs\|5mCs\|dTs\|5mCs\|oTs\|oGs\|oA] |
| 455 | [oTs\|o5mCs\|o5mCs\|LGs\|oGs\|oGs\|dTs\|dTs\|dTs\|5mCs\|dTs\|dAs\|dGs\|5mCs\|dTs\|5mCs\|oTs\|oGs\|oA] |
| 456 | [oTs\|o5mCs\|o5mCs\|oGs\|LGs\|oGs\|dTs\|dTs\|dTs\|5mCs\|dTs\|dAs\|dGs\|5mCs\|dTs\|5mCs\|oTs\|oGs\|oA] |
| 457 | [oTs\|o5mCs\|o5mCs\|dGs\|dGs\|dGs\|dTs\|dTs\|dTs\|5mCs\|dTs\|dAs\|dGs\|5mCs\|oTs\|o5mCs\|oTs\|oGs\|LAs\|oA] |
| 458 | [oTs\|o5mCs\|o5mCs\|dGs\|dGs\|dGs\|dTs\|dTs\|dTs\|5mCs\|dTs\|dAs\|dGs\|5mCs\|oTs\|o5mCs\|oTs\|LGs\|oAs\|oA] |
| 459 | [oTs\|o5mCs\|o5mCs\|dGs\|dGs\|dGs\|dTs\|dTs\|dTs\|5mCs\|dTs\|dAs\|dGs\|5mCs\|oTs\|o5mCs\|LTs\|oGs\|oAs\|oA] |
| 460 | [oTs\|L5mCs\|o5mCs\|oGs\|oGs\|oGs\|dTs\|dTs\|dTs\|5mCs\|dTs\|dAs\|dGs\|5mCs\|dTs\|5mCs\|oTs\|oG] |
| 461 | [oTs\|o5mCs\|L5mCs\|oGs\|oGs\|oGs\|dTs\|dTs\|dTs\|5mCs\|dTs\|dAs\|dGs\|5mCs\|dTs\|5mCs\|oTs\|oG] |
| 462 | [oTs\|o5mCs\|o5mCs\|LGs\|oGs\|oGs\|dTs\|dTs\|dTs\|5mCs\|dTs\|dAs\|dGs\|5mCs\|dTs\|5mCs\|oTs\|oG] |
| 463 | [oTs\|o5mCs\|o5mCs\|oGs\|LGs\|oGs\|dTs\|dTs\|dTs\|5mCs\|dTs\|dAs\|dGs\|5mCs\|dTs\|5mCs\|oTs\|oG] |
| 464 | [o5mCs\|oGs\|dGs\|dGs\|dTs\|dTs\|dTs\|5mCs\|dTs\|dAs\|dGs\|5mCs\|oTs\|o5mCs\|oTs\|oGs\|LAs\|oA] |
| 465 | [o5mCs\|oGs\|dGs\|dGs\|dTs\|dTs\|dTs\|5mCs\|dTs\|dAs\|dGs\|5mCs\|oTs\|o5mCs\|oTs\|LGs\|oAs\|oA] |
| 466 | [o5mCs\|oGs\|dGs\|dGs\|dTs\|dTs\|dTs\|5mCs\|dTs\|dAs\|dGs\|5mCs\|oTs\|o5mCs\|LTs\|oGs\|oAs\|oA] |
| 467 | [o5mCs\|oGs\|dGs\|dGs\|dTs\|dTs\|dTs\|5mCs\|dTs\|dAs\|dGs\|5mCs\|oTs\|L5mCs\|oTs\|oGs\|oAs\|oA] |
| 468 | [oTs\|L5mCs\|o5mCs\|oGs\|oGs\|dGs\|dTs\|dTs\|dTs\|5mCs\|dTs\|dAs\|dGs\|5mCs\|dTs\|o5mCs\|oTs\|oGs\|oAs\|oA] |
| 469 | [oTs\|o5mCs\|L5mCs\|oGs\|oGs\|dGs\|dTs\|dTs\|dTs\|5mCs\|dTs\|dAs\|dGs\|5mCs\|dTs\|o5mCs\|oTs\|oGs\|oAs\|oA] |
| 470 | [oTs\|o5mCs\|o5mCs\|LGs\|oGs\|dGs\|dTs\|dTs\|dTs\|5mCs\|dTs\|dAs\|dGs\|5mCs\|dTs\|o5mCs\|oTs\|oGs\|oAs\|oA] |
| 471 | [oTs\|o5mCs\|o5mCs\|oGs\|oGs\|dGs\|dTs\|dTs\|dTs\|5mCs\|dTs\|dAs\|dGs\|5mCs\|dTs\|o5mCs\|oTs\|oGs\|LAs\|oA] |
| 472 | [oTs\|o5mCs\|o5mCs\|oGs\|oGs\|dGs\|dTs\|dTs\|dTs\|5mCs\|dTs\|dAs\|dGs\|5mCs\|dTs\|o5mCs\|oTs\|LGs\|oAs\|oA] |
| 473 | [oTs\|o5mCs\|o5mCs\|oGs\|oGs\|dGs\|dTs\|dTs\|dTs\|5mCs\|dTs\|dAs\|dGs\|5mCs\|dTs\|o5mCs\|LTs\|oGs\|oAs\|oA] |
| 474 | [oTs\|L5mCs\|o5mCs\|oGs\|oGs\|dGs\|dTs\|dTs\|dTs\|5mCs\|dTs\|dAs\|dGs\|5mCs\|dTs\|o5mCs\|oTs\|oGs\|oA] |
| 475 | [oTs\|o5mCs\|L5mCs\|oGs\|oGs\|dGs\|dTs\|dTs\|dTs\|5mCs\|dTs\|dAs\|dGs\|5mCs\|dTs\|o5mCs\|oTs\|oGs\|oA] |
| 476 | [oTs\|o5mCs\|o5mCs\|LGs\|oGs\|dGs\|dTs\|dTs\|dTs\|5mCs\|dTs\|dAs\|dGs\|5mCs\|dTs\|o5mCs\|oTs\|oGs\|oA] |
| 477 | [o5mCs\|o5mCs\|oGs\|oGs\|dGs\|dTs\|dTs\|dTs\|5mCs\|dTs\|dAs\|dGs\|5mCs\|dTs\|o5mCs\|oTs\|oGs\|LAs\|oA] |
| 478 | [o5mCs\|o5mCs\|oGs\|oGs\|dGs\|dTs\|dTs\|dTs\|5mCs\|dTs\|dAs\|dGs\|5mCs\|dTs\|o5mCs\|oTs\|LGs\|oAs\|oA] |
| 479 | [o5mCs\|o5mCs\|oGs\|oGs\|dGs\|dTs\|dTs\|dTs\|5mCs\|dTs\|dAs\|dGs\|5mCs\|dTs\|o5mCs\|LTs\|oGs\|oAs\|oA] |
| 480 | [oTs\|L5mCs\|o5mCs\|oGs\|oGs\|dGs\|dTs\|dTs\|dTs\|5mCs\|dTs\|dAs\|dGs\|5mCs\|dTs\|o5mCs\|oTs\|oG] |
| 481 | [oTs\|o5mCs\|L5mCs\|oGs\|oGs\|dGs\|dTs\|dTs\|dTs\|5mCs\|dTs\|dAs\|dGs\|5mCs\|dTs\|o5mCs\|oTs\|oG] |
| 482 | [oTs\|o5mCs\|o5mCs\|LGs\|oGs\|dGs\|dTs\|dTs\|dTs\|5mCs\|dTs\|dAs\|dGs\|5mCs\|dTs\|o5mCs\|oTs\|oG] |
| 483 | [o5mCs\|oGs\|oGs\|dGs\|dTs\|dTs\|dTs\|5mCs\|dTs\|dAs\|dGs\|5mCs\|dTs\|o5mCs\|oTs\|oGs\|LAs\|oA] |
| 484 | [o5mCs\|oGs\|oGs\|dGs\|dTs\|dTs\|dTs\|5mCs\|dTs\|dAs\|dGs\|5mCs\|dTs\|o5mCs\|oTs\|LGs\|oAs\|oA] |
| 485 | [o5mCs\|oGs\|oGs\|dGs\|dTs\|dTs\|dTs\|5mCs\|dTs\|dAs\|dGs\|5mCs\|dTs\|o5mCs\|LTs\|oGs\|oAs\|oA] |
| 486 | [oTs\|L5mCs\|o5mCs\|oGs\|oGs\|dGs\|dTs\|dTs\|dTs\|5mCs\|dTs\|dAs\|dGs\|5mCs\|dTs\|o5mCs\|oT] |
| 487 | [oTs\|o5mCs\|L5mCs\|oGs\|oGs\|dGs\|dTs\|dTs\|dTs\|5mCs\|dTs\|dAs\|dGs\|5mCs\|dTs\|o5mCs\|oT] |
| 488 | [oTs\|o5mCs\|o5mCs\|LGs\|oGs\|dGs\|dTs\|dTs\|dTs\|5mCs\|dTs\|dAs\|dGs\|5mCs\|dTs\|o5mCs\|oT] |
| 489 | [oGs\|oGs\|dGs\|dTs\|dTs\|dTs\|5mCs\|dTs\|dAs\|dGs\|5mCs\|dTs\|o5mCs\|oTs\|oGs\|LAs\|oA] |
| 490 | [oGs\|oGs\|dGs\|dTs\|dTs\|dTs\|5mCs\|dTs\|dAs\|dGs\|5mCs\|dTs\|o5mCs\|oTs\|LGs\|oAs\|oA] |
| 491 | [oGs\|oGs\|dGs\|dTs\|dTs\|dTs\|5mCs\|dTs\|dAs\|dGs\|5mCs\|dTs\|o5mCs\|LTs\|oGs\|oAs\|oA] |
| 492 | [o5mCs\|L5mCs\|oGs\|oGs\|dGs\|dTs\|dTs\|dTs\|5mCs\|dTs\|dAs\|dGs\|5mCs\|dTs\|o5mCs\|oTs\|oGs\|oAs\|oA] |
| 493 | [o5mCs\|o5mCs\|LGs\|oGs\|dGs\|dTs\|dTs\|dTs\|5mCs\|dTs\|dAs\|dGs\|5mCs\|dTs\|o5mCs\|oTs\|oGs\|oAs\|oA] |
| 494 | [oTs\|o5mCs\|o5mCs\|oGs\|oGs\|dGs\|dTs\|dTs\|dTs\|5mCs\|dTs\|dAs\|dGs\|5mCs\|dTs\|o5mCs\|oTs\|LGs\|oA] |
| 495 | [oTs\|o5mCs\|o5mCs\|oGs\|oGs\|dGs\|dTs\|dTs\|dTs\|5mCs\|dTs\|dAs\|dGs\|5mCs\|dTs\|o5mCs\|LTs\|oGs\|oA] |
| 496 | [o5mCs\|L5mCs\|oGs\|oGs\|dGs\|dTs\|dTs\|dTs\|5mCs\|dTs\|dAs\|dGs\|5mCs\|dTs\|o5mCs\|oTs\|oGs\|oA] |
| 497 | [o5mCs\|o5mCs\|LGs\|oGs\|dGs\|dTs\|dTs\|dTs\|5mCs\|dTs\|dAs\|dGs\|5mCs\|dTs\|o5mCs\|oTs\|oGs\|oA] |
| 498 | [o5mCs\|o5mCs\|oGs\|oGs\|dGs\|dTs\|dTs\|dTs\|5mCs\|dTs\|dAs\|dGs\|5mCs\|dTs\|o5mCs\|oTs\|LGs\|oA] |
| 499 | [o5mCs\|o5mCs\|oGs\|oGs\|dGs\|dTs\|dTs\|dTs\|5mCs\|dTs\|dAs\|dGs\|5mCs\|dTs\|o5mCs\|LTs\|oGs\|oA] |
| 500 | [o5mCs\|L5mCs\|oGs\|oGs\|dGs\|dTs\|dTs\|dTs\|5mCs\|dTs\|dAs\|dGs\|5mCs\|dTs\|o5mCs\|oTs\|oG] |
| 501 | [o5mCs\|o5mCs\|LGs\|oGs\|dGs\|dTs\|dTs\|dTs\|5mCs\|dTs\|dAs\|dGs\|5mCs\|dTs\|o5mCs\|oTs\|oG] |
| 502 | [o5mCs\|o5mCs\|oGs\|oGs\|dGs\|dTs\|dTs\|dTs\|5mCs\|dTs\|dAs\|dGs\|5mCs\|dTs\|o5mCs\|LTs\|oG] |
| 503 | [oTs\|o5mCs\|o5mCs\|oGs\|oGs\|oGs\|oTs\|oTs\|dTs\|5mCs\|dTs\|dAs\|dGs\|5mCs\|dTs\|5mCs\|dTs\|dGs\|oAs\|oA] |
| 504 | [oTs\|o5mCs\|5mCs\|dGs\|dGs\|dGs\|dTs\|dTs\|dTs\|5mCs\|dTs\|dAs\|oGs\|o5mCs\|oTs\|o5mCs\|oTs\|oGs\|oAs\|oA] |
| 505 | [oTs\|o5mCs\|o5mCs\|oGs\|oGs\|oGs\|oTs\|dTs\|dTs\|5mCs\|dTs\|dAs\|dGs\|5mCs\|dTs\|5mCs\|dTs\|oGs\|oAs\|oA] |
| 506 | [oTs\|o5mCs\|o5mCs\|dGs\|dGs\|dGs\|dTs\|dTs\|dTs\|5mCs\|dTs\|dAs\|dGs\|o5mCs\|oTs\|o5mCs\|oTs\|oGs\|oAs\|oA] |
| 507 | [oTs\|o5mCs\|o5mCs\|oGs\|oGs\|oGs\|oTs\|dTs\|dTs\|5mCs\|dTs\|dAs\|dGs\|5mCs\|dTs\|5mCs\|dTs\|oGs\|oA] |
| 508 | [o5mCs\|o5mCs\|dGs\|dGs\|dGs\|dTs\|dTs\|dTs\|5mCs\|dTs\|dAs\|dGs\|o5mCs\|oTs\|o5mCs\|oTs\|oGs\|oAs\|oA] |
| 509 | [oTs\|o5mCs\|o5mCs\|oGs\|oGs\|oGs\|dTs\|dTs\|dTs\|5mCs\|dTs\|dAs\|dGs\|5mCs\|dTs\|5mCs\|oTs\|oGs\|oAs\|oA] |
| 510 | [oTs\|o5mCs\|o5mCs\|oGs\|dGs\|dGs\|dTs\|dTs\|dTs\|5mCs\|dTs\|dAs\|dGs\|5mCs\|oTs\|o5mCs\|oTs\|oGs\|oAs\|oA] |
| 511 | [oTs\|o5mCs\|o5mCs\|oGs\|oGs\|oGs\|dTs\|dTs\|dTs\|5mCs\|dTs\|dAs\|dGs\|5mCs\|dTs\|5mCs\|oTs\|oGs\|oA] |
| 512 | [oTs\|o5mCs\|o5mCs\|dGs\|dGs\|dGs\|dTs\|dTs\|dTs\|5mCs\|dTs\|dAs\|dGs\|5mCs\|oTs\|o5mCs\|oTs\|oGs\|oAs\|oA] |
| 513 | [oTs\|o5mCs\|o5mCs\|oGs\|oGs\|oGs\|dTs\|dTs\|dTs\|5mCs\|dTs\|dAs\|dGs\|5mCs\|dTs\|5mCs\|oTs\|oG] |
| 514 | [o5mCs\|oGs\|dGs\|dGs\|dTs\|dTs\|dTs\|5mCs\|dTs\|dAs\|dGs\|5mCs\|oTs\|o5mCs\|oTs\|oGs\|oAs\|oA] |
| 515 | [oTs\|o5mCs\|o5mCs\|oGs\|oGs\|dGs\|dTs\|dTs\|dTs\|5mCs\|dTs\|dAs\|dGs\|5mCs\|dTs\|o5mCs\|oTs\|oGs\|oAs\|oA] |
| 516 | [oTs\|o5mCs\|o5mCs\|oGs\|oGs\|dGs\|dTs\|dTs\|dTs\|5mCs\|dTs\|dAs\|dGs\|5mCs\|dTs\|o5mCs\|oTs\|oGs\|oA] |
| 517 | [oTs\|o5mCs\|o5mCs\|oGs\|oGs\|dGs\|dTs\|dTs\|dTs\|5mCs\|dTs\|dAs\|dGs\|5mCs\|dTs\|o5mCs\|oTs\|oG] |
| 518 | [o5mCs\|oGs\|oGs\|dGs\|dTs\|dTs\|dTs\|5mCs\|dTs\|dAs\|dGs\|5mCs\|dTs\|o5mCs\|oTs\|oGs\|oAs\|oA] |
| 519 | [oTs\|o5mCs\|o5mCs\|oGs\|oGs\|dGs\|dTs\|dTs\|dTs\|5mCs\|dTs\|dAs\|dGs\|5mCs\|dTs\|o5mCs\|oT] |
| 520 | [oGs\|oGs\|dGs\|dTs\|dTs\|dTs\|5mCs\|dTs\|dAs\|dGs\|5mCs\|dTs\|o5mCs\|oTs\|oGs\|oAs\|oA] |
| 521 | [o5mCs\|o5mCs\|oGs\|oGs\|dGs\|dTs\|dTs\|dTs\|5mCs\|dTs\|dAs\|dGs\|5mCs\|dTs\|o5mCs\|oTs\|oGs\|oAs\|oA] |
| 522 | [o5mCs\|o5mCs\|oGs\|oGs\|dGs\|dTs\|dTs\|dTs\|5mCs\|dTs\|dAs\|dGs\|5mCs\|dTs\|o5mCs\|oTs\|oGs\|oA] |
| 523 | [o5mCs\|o5mCs\|oGs\|oGs\|dGs\|dTs\|dTs\|dTs\|5mCs\|dTs\|dAs\|dGs\|5mCs\|dTs\|o5mCs\|oTs\|oG] |
| 524 | [oTs\|o5mCs\|o5mCp\|oGs\|oGs\|dGs\|dTs\|dTs\|dTs\|5mCs\|dTs\|dAs\|dGs\|5mCs\|dTs\|o5mCs\|oTs\|oGs\|oAs\|oA] |
| 525 | [oTs\|o5mCs\|o5mCs\|oGp\|oGs\|dGs\|dTs\|dTs\|dTs\|5mCs\|dTs\|dAs\|dGs\|5mCs\|dTs\|o5mCs\|oTs\|oGs\|oAs\|oA] |
| 526 | [oTs\|o5mCs\|o5mCp\|oGp\|oGs\|dGs\|dTs\|dTs\|dTs\|5mCs\|dTs\|dAs\|dGs\|5mCs\|dTs\|o5mCs\|oTs\|oGs\|oAs\|oA] |
| 527 | [oTs\|o5mCs\|o5mCs\|oGs\|oGs\|dGs\|dTs\|dTs\|dTs\|5mCs\|dTs\|dAs\|dGs\|5mCs\|dTs\|o5mCs\|oTp\|oGs\|oAs\|oA] |
| 528 | [oTs\|o5mCs\|o5mCs\|oGs\|oGs\|dGs\|dTs\|dTs\|dTs\|5mCs\|dTs\|dAs\|dGs\|5mCs\|dTs\|o5mCp\|oTs\|oGs\|oAs\|oA] |
| 529 | [oTs\|o5mCs\|o5mCs\|oGs\|oGs\|dGs\|dTs\|dTs\|dTs\|5mCs\|dTs\|dAs\|dGs\|5mCs\|dTs\|o5mCp\|oTp\|oGs\|oAs\|oA] |
| 530 | [oTs\|o5mCs\|o5mCp\|oGs\|oGs\|dGs\|dTs\|dTs\|dTs\|5mCs\|dTs\|dAs\|dGs\|5mCs\|dTs\|o5mCs\|oTp\|oGs\|oAs\|oA] |
| 531 | [oTs\|o5mCs\|o5mCp\|oGs\|oGs\|dGs\|dTs\|dTs\|dTs\|5mCs\|dTs\|dAs\|dGs\|5mCs\|dTs\|o5mCp\|oTs\|oGs\|oAs\|oA] |
| 532 | [oTs\|o5mCs\|o5mCs\|oGp\|oGs\|dGs\|dTs\|dTs\|dTs\|5mCs\|dTs\|dAs\|dGs\|5mCs\|dTs\|o5mCs\|oTp\|oGs\|oAs\|oA] |
| 533 | [oTs\|o5mCs\|o5mCs\|oGp\|oGs\|dGs\|dTs\|dTs\|dTs\|5mCs\|dTs\|dAs\|dGs\|5mCs\|dTs\|o5mCp\|oTs\|oGs\|oAs\|oA] |
| 534 | [oTs\|o5mCs\|o5mCp\|oGs\|oGs\|dGs\|dTs\|dTs\|dTs\|5mCs\|dTs\|dAs\|dGs\|5mCs\|dTs\|o5mCp\|oTp\|oGs\|oAs\|oA] |
| 535 | [oTs\|o5mCs\|o5mCs\|oGp\|oGs\|dGs\|dTs\|dTs\|dTs\|5mCs\|dTs\|dAs\|dGs\|5mCs\|dTs\|o5mCp\|oTp\|oGs\|oAs\|oA] |
| 536 | [oTs\|o5mCs\|o5mCp\|oGp\|oGs\|dGs\|dTs\|dTs\|dTs\|5mCs\|dTs\|dAs\|dGs\|5mCs\|dTs\|o5mCs\|oTp\|oGs\|oAs\|oA] |
| 537 | [oTs\|o5mCs\|o5mCp\|oGp\|oGs\|dGs\|dTs\|dTs\|dTs\|5mCs\|dTs\|dAs\|dGs\|5mCs\|dTs\|o5mCp\|oTs\|oGs\|oAs\|oA] |
| 538 | [oTs\|o5mCs\|o5mCp\|oGp\|oGs\|dGs\|dTs\|dTs\|dTs\|5mCs\|dTs\|dAs\|dGs\|5mCs\|dTs\|o5mCp\|oTp\|oGs\|oAs\|oA] |
| 539 | [oTs\|o5mCs\|o5mCs\|oGs\|oGs\|dGs\|dTs\|dTs\|dTs\|5mCs\|dTs\|dAs\|dGs\|5mCs\|dTs\|o5mCs\|oTs\|oGs\|oAs\|oAs\|o5mC] |
| 540 | [oTs\|o5mCs\|o5mCp\|oGs\|oGs\|dGs\|dTs\|dTs\|dTs\|5mCs\|dTs\|dAs\|dGs\|5mCs\|dTs\|o5mCs\|oTs\|oGs\|oAs\|oAs\|o5mC] |
| 541 | [oTs\|o5mCs\|o5mCs\|oGp\|oGs\|dGs\|dTs\|dTs\|dTs\|5mCs\|dTs\|dAs\|dGs\|5mCs\|dTs\|o5mCs\|oTs\|oGs\|oAs\|oAs\|o5mC] |
| 542 | [oTs\|o5mCs\|o5mCp\|oGp\|oGs\|dGs\|dTs\|dTs\|dTs\|5mCs\|dTs\|dAs\|dGs\|5mCs\|dTs\|o5mCs\|oTs\|oGs\|oAs\|oAs\|o5mC] |
| 543 | [oTs\|o5mCs\|o5mCs\|oGs\|oGs\|dGs\|dTs\|dTs\|dTs\|5mCs\|dTs\|dAs\|dGs\|5mCs\|dTs\|o5mCs\|oTp\|oGs\|oAs\|oAs\|o5mC] |
| 544 | [oTs\|o5mCs\|o5mCs\|oGs\|oGs\|dGs\|dTs\|dTs\|dTs\|5mCs\|dTs\|dAs\|dGs\|5mCs\|dTs\|o5mCp\|oTs\|oGs\|oAs\|oAs\|o5mC] |
| 545 | [oTs\|o5mCs\|o5mCs\|oGs\|oGs\|dGs\|dTs\|dTs\|dTs\|5mCs\|dTs\|dAs\|dGs\|5mCs\|dTs\|o5mCp\|oTp\|oGs\|oAs\|oAs\|o5mC] |
| 546 | [oTs\|o5mCs\|o5mCp\|oGs\|oGs\|dGs\|dTs\|dTs\|dTs\|5mCs\|dTs\|dAs\|dGs\|5mCs\|dTs\|o5mCs\|oTp\|oGs\|oAs\|oAs\|o5mC] |
| 547 | [oTs\|o5mCs\|o5mCp\|oGs\|oGs\|dGs\|dTs\|dTs\|dTs\|5mCs\|dTs\|dAs\|dGs\|5mCs\|dTs\|o5mCp\|oTs\|oGs\|oAs\|oAs\|o5mC] |
| 548 | [oTs\|o5mCs\|o5mCs\|oGp\|oGs\|dGs\|dTs\|dTs\|dTs\|5mCs\|dTs\|dAs\|dGs\|5mCs\|dTs\|o5mCs\|oTp\|oGs\|oAs\|oAs\|o5mC] |
| 549 | [oTs\|o5mCs\|o5mCs\|oGp\|oGs\|dGs\|dTs\|dTs\|dTs\|5mCs\|dTs\|dAs\|dGs\|5mCs\|dTs\|o5mCp\|oTs\|oGs\|oAs\|oAs\|o5mC] |
| 550 | [oTs\|o5mCs\|o5mCp\|oGs\|oGs\|dGs\|dTs\|dTs\|dTs\|5mCs\|dTs\|dAs\|dGs\|5mCs\|dTs\|o5mCp\|oTp\|oGs\|oAs\|oAs\|o5mC] |
| 551 | [oTs\|o5mCs\|o5mCs\|oGp\|oGs\|dGs\|dTs\|dTs\|dTs\|5mCs\|dTs\|dAs\|dGs\|5mCs\|dTs\|o5mCp\|oTp\|oGs\|oAs\|oAs\|o5mC] |
| 552 | [oTs\|o5mCs\|o5mCp\|oGp\|oGs\|dGs\|dTs\|dTs\|dTs\|5mCs\|dTs\|dAs\|dGs\|5mCs\|dTs\|o5mCs\|oTp\|oGs\|oAs\|oAs\|o5mC] |
| 553 | [oTs\|o5mCs\|o5mCp\|oGp\|oGs\|dGs\|dTs\|dTs\|dTs\|5mCs\|dTs\|dAs\|dGs\|5mCs\|dTs\|o5mCp\|oTs\|oGs\|oAs\|oAs\|o5mC] |
| 554 | [oTs\|o5mCs\|o5mCp\|oGp\|oGs\|dGs\|dTs\|dTs\|dTs\|5mCs\|dTs\|dAs\|dGs\|5mCs\|dTs\|o5mCp\|oTp\|oGs\|oAs\|oAs\|o5mC] |
| 555 | [oTs\|o5mCs\|o5mCs\|oGs\|oGs\|dGs\|dTs\|dTs\|dTs\|5mCs\|dTs\|dAs\|dGs\|5mCs\|dTs\|o5mCs\|oTs\|oGs\|oAs\|oAs\|o5mCs\|oG] |
| 556 | [oTs\|o5mCs\|o5mCp\|oGs\|oGs\|dGs\|dTs\|dTs\|dTs\|5mCs\|dTs\|dAs\|dGs\|5mCs\|dTs\|o5mCs\|oTs\|oGs\|oAs\|oAs\|o5mCs\|oG] |
| 557 | [oTs\|o5mCs\|o5mCs\|oGp\|oGs\|dGs\|dTs\|dTs\|dTs\|5mCs\|dTs\|dAs\|dGs\|5mCs\|dTs\|o5mCs\|oTs\|oGs\|oAs\|oAs\|o5mCs\|oG] |
| 558 | [oTs\|o5mCs\|o5mCp\|oGp\|oGs\|dGs\|dTs\|dTs\|dTs\|5mCs\|dTs\|dAs\|dGs\|5mCs\|dTs\|o5mCs\|oTs\|oGs\|oAs\|oAs\|o5mCs\|oG] |
| 559 | [oTs\|o5mCs\|o5mCs\|oGs\|oGs\|dGs\|dTs\|dTs\|dTs\|5mCs\|dTs\|dAs\|dGs\|5mCs\|dTs\|o5mCs\|oTp\|oGs\|oAs\|oAs\|o5mCs\|oG] |
| 560 | [oTs\|o5mCs\|o5mCs\|oGs\|oGs\|dGs\|dTs\|dTs\|dTs\|5mCs\|dTs\|dAs\|dGs\|5mCs\|dTs\|o5mCp\|oTs\|oGs\|oAs\|oAs\|o5mCs\|oG] |
| 561 | [oTs\|o5mCs\|o5mCs\|oGs\|oGs\|dGs\|dTs\|dTs\|dTs\|5mCs\|dTs\|dAs\|dGs\|5mCs\|dTs\|o5mCp\|oTp\|oGs\|oAs\|oAs\|o5mCs\|oG] |
| 562 | [oTs\|o5mCs\|o5mCp\|oGs\|oGs\|dGs\|dTs\|dTs\|dTs\|5mCs\|dTs\|dAs\|dGs\|5mCs\|dTs\|o5mCs\|oTp\|oGs\|oAs\|oAs\|o5mCs\|oG] |
| 563 | [oTs\|o5mCs\|o5mCp\|oGs\|oGs\|dGs\|dTs\|dTs\|dTs\|5mCs\|dTs\|dAs\|dGs\|5mCs\|dTs\|o5mCp\|oTs\|oGs\|oAs\|oAs\|o5mCs\|oG] |
| 564 | [oTs\|o5mCs\|o5mCs\|oGp\|oGs\|dGs\|dTs\|dTs\|dTs\|5mCs\|dTs\|dAs\|dGs\|5mCs\|dTs\|o5mCs\|oTp\|oGs\|oAs\|oAs\|o5mCs\|oG] |
| 565 | [oTs\|o5mCs\|o5mCs\|oGp\|oGs\|dGs\|dTs\|dTs\|dTs\|5mCs\|dTs\|dAs\|dGs\|5mCs\|dTs\|o5mCp\|oTs\|oGs\|oAs\|oAs\|o5mCs\|oG] |
| 566 | [oTs\|o5mCs\|o5mCp\|oGs\|oGs\|dGs\|dTs\|dTs\|dTs\|5mCs\|dTs\|dAs\|dGs\|5mCs\|dTs\|o5mCp\|oTp\|oGs\|oAs\|oAs\|o5mCs\|oG] |
| 567 | [oTs\|o5mCs\|o5mCs\|oGp\|oGs\|dGs\|dTs\|dTs\|dTs\|5mCs\|dTs\|dAs\|dGs\|5mCs\|dTs\|o5mCp\|oTp\|oGs\|oAs\|oAs\|o5mCs\|oG] |
| 568 | [oTs\|o5mCs\|o5mCp\|oGp\|oGs\|dGs\|dTs\|dTs\|dTs\|5mCs\|dTs\|dAs\|dGs\|5mCs\|dTs\|o5mCs\|oTp\|oGs\|oAs\|oAs\|o5mCs\|oG] |
| 569 | [oTs\|o5mCs\|o5mCp\|oGp\|oGs\|dGs\|dTs\|dTs\|dTs\|5mCs\|dTs\|dAs\|dGs\|5mCs\|dTs\|o5mCp\|oTs\|oGs\|oAs\|oAs\|o5mCs\|oG] |
| 570 | [oTs\|o5mCs\|o5mCp\|oGp\|oGs\|dGs\|dTs\|dTs\|dTs\|5mCs\|dTs\|dAs\|dGs\|5mCs\|dTs\|o5mCp\|oTp\|oGs\|oAs\|oAs\|o5mCs\|oG] |
| 571 | [oTs\|o5mCs\|o5mCs\|oGs\|oGs\|dGs\|dTs\|dTs\|dTs\|5mCs\|dTs\|dAs\|dGs\|5mCs\|dTs\|o5mCs\|oTs\|oGs\|oAs\|oAs\|o5mCs\|oGs\|oA] |
| 572 | [oTs\|o5mCs\|o5mCp\|oGs\|oGs\|dGs\|dTs\|dTs\|dTs\|5mCs\|dTs\|dAs\|dGs\|5mCs\|dTs\|o5mCs\|oTs\|oGs\|oAs\|oAs\|o5mCs\|oGs\|oA] |
| 573 | [oTs\|o5mCs\|o5mCs\|oGp\|oGs\|dGs\|dTs\|dTs\|dTs\|5mCs\|dTs\|dAs\|dGs\|5mCs\|dTs\|o5mCs\|oTs\|oGs\|oAs\|oAs\|o5mCs\|oGs\|oA] |
| 574 | [oTs\|o5mCs\|o5mCp\|oGp\|oGs\|dGs\|dTs\|dTs\|dTs\|5mCs\|dTs\|dAs\|dGs\|5mCs\|dTs\|o5mCs\|oTs\|oGs\|oAs\|oAs\|o5mCs\|oGs\|oA] |
| 575 | [oTs\|o5mCs\|o5mCs\|oGs\|oGs\|dGs\|dTs\|dTs\|dTs\|5mCs\|dTs\|dAs\|dGs\|5mCs\|dTs\|o5mCs\|oTp\|oGs\|oAs\|oAs\|o5mCs\|oGs\|oA] |
| 576 | [oTs\|o5mCs\|o5mCs\|oGs\|oGs\|dGs\|dTs\|dTs\|dTs\|5mCs\|dTs\|dAs\|dGs\|5mCs\|dTs\|o5mCp\|oTs\|oGs\|oAs\|oAs\|o5mCs\|oGs\|oA] |
| 577 | [oTs\|o5mCs\|o5mCs\|oGs\|oGs\|dGs\|dTs\|dTs\|dTs\|5mCs\|dTs\|dAs\|dGs\|5mCs\|dTs\|o5mCp\|oTp\|oGs\|oAs\|oAs\|o5mCs\|oGs\|oA] |
| 578 | [oTs\|o5mCs\|o5mCp\|oGs\|oGs\|dGs\|dTs\|dTs\|dTs\|5mCs\|dTs\|dAs\|dGs\|5mCs\|dTs\|o5mCs\|oTp\|oGs\|oAs\|oAs\|o5mCs\|oGs\|oA] |
| 579 | [oTs\|o5mCs\|o5mCp\|oGs\|oGs\|dGs\|dTs\|dTs\|dTs\|5mCs\|dTs\|dAs\|dGs\|5mCs\|dTs\|o5mCp\|oTs\|oGs\|oAs\|oAs\|o5mCs\|oGs\|oA] |
| 580 | [oTs\|o5mCs\|o5mCs\|oGp\|oGs\|dGs\|dTs\|dTs\|dTs\|5mCs\|dTs\|dAs\|dGs\|5mCs\|dTs\|o5mCs\|oTp\|oGs\|oAs\|oAs\|o5mCs\|oGs\|oA] |
| 581 | [oTs\|o5mCs\|o5mCs\|oGp\|oGs\|dGs\|dTs\|dTs\|dTs\|5mCs\|dTs\|dAs\|dGs\|5mCs\|dTs\|o5mCp\|oTs\|oGs\|oAs\|oAs\|o5mCs\|oGs\|oA] |
| 582 | [oTs\|o5mCs\|o5mCp\|oGs\|oGs\|dGs\|dTs\|dTs\|dTs\|5mCs\|dTs\|dAs\|dGs\|5mCs\|dTs\|o5mCp\|oTp\|oGs\|oAs\|oAs\|o5mCs\|oGs\|oA] |
| 583 | [oTs\|o5mCs\|o5mCs\|oGp\|oGs\|dGs\|dTs\|dTs\|dTs\|5mCs\|dTs\|dAs\|dGs\|5mCs\|dTs\|o5mCp\|oTp\|oGs\|oAs\|oAs\|o5mCs\|oGs\|oA] |
| 584 | [oTs\|o5mCs\|o5mCp\|oGp\|oGs\|dGs\|dTs\|dTs\|dTs\|5mCs\|dTs\|dAs\|dGs\|5mCs\|dTs\|o5mCs\|oTp\|oGs\|oAs\|oAs\|o5mCs\|oGs\|oA] |
| 585 | [oTs\|o5mCs\|o5mCp\|oGp\|oGs\|dGs\|dTs\|dTs\|dTs\|5mCs\|dTs\|dAs\|dGs\|5mCs\|dTs\|o5mCp\|oTs\|oGs\|oAs\|oAs\|o5mCs\|oGs\|oA] |
| 586 | [oTs\|o5mCs\|o5mCp\|oGp\|oGs\|dGs\|dTs\|dTs\|dTs\|5mCs\|dTs\|dAs\|dGs\|5mCs\|dTs\|o5mCp\|oTp\|oGs\|oAs\|oAs\|o5mCs\|oGs\|oA] |
| 587 | [oTs\|o5mCs\|o5mCs\|oGs\|oGs\|dGs\|dTs\|dTs\|dTs\|5mCs\|dTs\|dAs\|dGs\|5mCs\|dTs\|5mCs\|oTs\|oGs\|oAs\|oAs\|o5mC] |
| 588 | [oTs\|o5mCs\|o5mCp\|oGs\|oGs\|dGs\|dTs\|dTs\|dTs\|5mCs\|dTs\|dAs\|dGs\|5mCs\|dTs\|5mCs\|oTs\|oGs\|oAs\|oAs\|o5mC] |
| 589 | [oTs\|o5mCs\|o5mCs\|oGp\|oGs\|dGs\|dTs\|dTs\|dTs\|5mCs\|dTs\|dAs\|dGs\|5mCs\|dTs\|5mCs\|oTs\|oGs\|oAs\|oAs\|o5mC] |
| 590 | [oTs\|o5mCs\|o5mCp\|oGp\|oGs\|dGs\|dTs\|dTs\|dTs\|5mCs\|dTs\|dAs\|dGs\|5mCs\|dTs\|5mCs\|oTs\|oGs\|oAs\|oAs\|o5mC] |
| 591 | [oTs\|o5mCs\|o5mCs\|oGs\|oGs\|dGs\|dTs\|dTs\|dTs\|5mCs\|dTs\|dAs\|dGs\|5mCs\|dTs\|5mCs\|oTp\|oGs\|oAs\|oAs\|o5mC] |
| 592 | [oTs\|o5mCs\|o5mCs\|oGs\|oGs\|dGs\|dTs\|dTs\|dTs\|5mCs\|dTs\|dAs\|dGs\|5mCs\|dTs\|5mCp\|oTs\|oGs\|oAs\|oAs\|o5mC] |
| 593 | [oTs\|o5mCs\|o5mCs\|oGs\|oGs\|dGs\|dTs\|dTs\|dTs\|5mCs\|dTs\|dAs\|dGs\|5mCs\|dTs\|5mCp\|oTp\|oGs\|oAs\|oAs\|o5mC] |
| 594 | [oTs\|o5mCs\|o5mCp\|oGs\|oGs\|dGs\|dTs\|dTs\|dTs\|5mCs\|dTs\|dAs\|dGs\|5mCs\|dTs\|5mCs\|oTp\|oGs\|oAs\|oAs\|o5mC] |
| 595 | [oTs\|o5mCs\|o5mCp\|oGs\|oGs\|dGs\|dTs\|dTs\|dTs\|5mCs\|dTs\|dAs\|dGs\|5mCs\|dTs\|5mCp\|oTs\|oGs\|oAs\|oAs\|o5mC] |
| 596 | [oTs\|o5mCs\|o5mCs\|oGp\|oGs\|dGs\|dTs\|dTs\|dTs\|5mCs\|dTs\|dAs\|dGs\|5mCs\|dTs\|5mCs\|oTp\|oGs\|oAs\|oAs\|o5mC] |
| 597 | [oTs\|o5mCs\|o5mCs\|oGp\|oGs\|dGs\|dTs\|dTs\|dTs\|5mCs\|dTs\|dAs\|dGs\|5mCs\|dTs\|5mCp\|oTs\|oGs\|oAs\|oAs\|o5mC] |
| 598 | [oTs\|o5mCs\|o5mCp\|oGs\|oGs\|dGs\|dTs\|dTs\|dTs\|5mCs\|dTs\|dAs\|dGs\|5mCs\|dTs\|5mCp\|oTp\|oGs\|oAs\|oAs\|o5mC] |
| 599 | [oTs\|o5mCs\|o5mCs\|oGp\|oGs\|dGs\|dTs\|dTs\|dTs\|5mCs\|dTs\|dAs\|dGs\|5mCs\|dTs\|5mCp\|oTp\|oGs\|oAs\|oAs\|o5mC] |
| 600 | [oTs\|o5mCs\|o5mCp\|oGp\|oGs\|dGs\|dTs\|dTs\|dTs\|5mCs\|dTs\|dAs\|dGs\|5mCs\|dTs\|5mCs\|oTp\|oGs\|oAs\|oAs\|o5mC] |
| 601 | [oTs\|o5mCs\|o5mCp\|oGp\|oGs\|dGs\|dTs\|dTs\|dTs\|5mCs\|dTs\|dAs\|dGs\|5mCs\|dTs\|5mCp\|oTs\|oGs\|oAs\|oAs\|o5mC] |
| 602 | [oTs\|o5mCs\|o5mCp\|oGp\|oGs\|dGs\|dTs\|dTs\|dTs\|5mCs\|dTs\|dAs\|dGs\|5mCs\|dTs\|5mCp\|oTp\|oGs\|oAs\|oAs\|o5mC] |
| 603 | [oTs\|o5mCs\|o5mCs\|oGs\|oGs\|dGs\|dTs\|dTs\|dTs\|5mCs\|dTs\|dAs\|dGs\|5mCs\|dTs\|5mCs\|dTs\|oGs\|oAs\|oAs\|o5mCs\|oG] |
| 604 | [oTs\|o5mCs\|o5mCp\|oGs\|oGs\|dGs\|dTs\|dTs\|dTs\|5mCs\|dTs\|dAs\|dGs\|5mCs\|dTs\|5mCs\|dTs\|oGs\|oAs\|oAs\|o5mCs\|oG] |
| 605 | [oTs\|o5mCs\|o5mCs\|oGp\|oGs\|dGs\|dTs\|dTs\|dTs\|5mCs\|dTs\|dAs\|dGs\|5mCs\|dTs\|5mCs\|dTs\|oGs\|oAs\|oAs\|o5mCs\|oG] |
| 606 | [oTs\|o5mCs\|o5mCp\|oGp\|oGs\|dGs\|dTs\|dTs\|dTs\|5mCs\|dTs\|dAs\|dGs\|5mCs\|dTs\|5mCs\|dTs\|oGs\|oAs\|oAs\|o5mCs\|oG] |
| 607 | [oTs\|o5mCs\|o5mCs\|oGs\|oGs\|dGs\|dTs\|dTs\|dTs\|5mCs\|dTs\|dAs\|dGs\|5mCs\|dTs\|5mCs\|dTp\|oGs\|oAs\|oAs\|o5mCs\|oG] |
| 608 | [oTs\|o5mCs\|o5mCs\|oGs\|oGs\|dGs\|dTs\|dTs\|dTs\|5mCs\|dTs\|dAs\|dGs\|5mCs\|dTs\|5mCp\|dTs\|oGs\|oAs\|oAs\|o5mCs\|oG] |
| 609 | [oTs\|o5mCs\|o5mCs\|oGs\|oGs\|dGs\|dTs\|dTs\|dTs\|5mCs\|dTs\|dAs\|dGs\|5mCs\|dTs\|5mCp\|dTp\|oGs\|oAs\|oAs\|o5mCs\|oG] |
| 610 | [oTs\|o5mCs\|o5mCp\|oGs\|oGs\|dGs\|dTs\|dTs\|dTs\|5mCs\|dTs\|dAs\|dGs\|5mCs\|dTs\|5mCs\|dTp\|oGs\|oAs\|oAs\|o5mCs\|oG] |
| 611 | [oTs\|o5mCs\|o5mCp\|oGs\|oGs\|dGs\|dTs\|dTs\|dTs\|5mCs\|dTs\|dAs\|dGs\|5mCs\|dTs\|5mCp\|dTs\|oGs\|oAs\|oAs\|o5mCs\|oG] |
| 612 | [oTs\|o5mCs\|o5mCs\|oGp\|oGs\|dGs\|dTs\|dTs\|dTs\|5mCs\|dTs\|dAs\|dGs\|5mCs\|dTs\|5mCs\|dTp\|oGs\|oAs\|oAs\|o5mCs\|oG] |
| 613 | [oTs\|o5mCs\|o5mCs\|oGp\|oGs\|dGs\|dTs\|dTs\|dTs\|5mCs\|dTs\|dAs\|dGs\|5mCs\|dTs\|5mCp\|dTs\|oGs\|oAs\|oAs\|o5mCs\|oG] |
| 614 | [oTs\|o5mCs\|o5mCp\|oGs\|oGs\|dGs\|dTs\|dTs\|dTs\|5mCs\|dTs\|dAs\|dGs\|5mCs\|dTs\|5mCp\|dTp\|oGs\|oAs\|oAs\|o5mCs\|oG] |
| 615 | [oTs\|o5mCs\|o5mCs\|oGp\|oGs\|dGs\|dTs\|dTs\|dTs\|5mCs\|dTs\|dAs\|dGs\|5mCs\|dTs\|5mCp\|dTp\|oGs\|oAs\|oAs\|o5mCs\|oG] |
| 616 | [oTs\|o5mCs\|o5mCp\|oGp\|oGs\|dGs\|dTs\|dTs\|dTs\|5mCs\|dTs\|dAs\|dGs\|5mCs\|dTs\|5mCs\|dTp\|oGs\|oAs\|oAs\|o5mCs\|oG] |
| 617 | [oTs\|o5mCs\|o5mCp\|oGp\|oGs\|dGs\|dTs\|dTs\|dTs\|5mCs\|dTs\|dAs\|dGs\|5mCs\|dTs\|5mCp\|dTs\|oGs\|oAs\|oAs\|o5mCs\|oG] |
| 618 | [oTs\|o5mCs\|o5mCp\|oGp\|oGs\|dGs\|dTs\|dTs\|dTs\|5mCs\|dTs\|dAs\|dGs\|5mCs\|dTs\|5mCp\|dTp\|oGs\|oAs\|oAs\|o5mCs\|oG] |
| 619 | [oAs\|LTs\|o5mCs\|o5mCs\|oGs\|oGs\|oGs\|oTs\|dTs\|dTs\|5mCs\|dTs\|dAs\|dGs\|5mCs\|dTs\|5mCs\|dTs\|oGs\|oA] |
| 620 | [oAs\|oTs\|L5mCs\|o5mCs\|oGs\|oGs\|oGs\|oTs\|dTs\|dTs\|5mCs\|dTs\|dAs\|dGs\|5mCs\|dTs\|5mCs\|dTs\|oGs\|oA] |
| 621 | [oAs\|oTs\|o5mCs\|L5mCs\|oGs\|oGs\|oGs\|oTs\|dTs\|dTs\|5mCs\|dTs\|dAs\|dGs\|5mCs\|dTs\|5mCs\|dTs\|oGs\|oA] |
| 622 | [oAs\|oTs\|o5mCs\|o5mCs\|LGs\|oGs\|oGs\|oTs\|dTs\|dTs\|5mCs\|dTs\|dAs\|dGs\|5mCs\|dTs\|5mCs\|dTs\|oGs\|oA] |
| 623 | [oAs\|oTs\|o5mCs\|o5mCs\|oGs\|LGs\|oGs\|oTs\|dTs\|dTs\|5mCs\|dTs\|dAs\|dGs\|5mCs\|dTs\|5mCs\|dTs\|oGs\|oA] |
| 624 | [oAs\|oTs\|o5mCs\|o5mCs\|oGs\|oGs\|LGs\|oTs\|dTs\|dTs\|5mCs\|dTs\|dAs\|dGs\|5mCs\|dTs\|5mCs\|dTs\|oGs\|oA] |
| 625 | [oAs\|oTs\|5mCs\|5mCs\|dGs\|dGs\|dGs\|dTs\|dTs\|dTs\|5mCs\|dTs\|oAs\|oGs\|o5mCs\|oTs\|o5mCs\|oTs\|LGs\|oA] |
| 626 | [oAs\|oTs\|5mCs\|5mCs\|dGs\|dGs\|dGs\|dTs\|dTs\|dTs\|5mCs\|dTs\|oAs\|oGs\|o5mCs\|oTs\|o5mCs\|LTs\|oGs\|oA] |
| 627 | [oAs\|oTs\|5mCs\|5mCs\|dGs\|dGs\|dGs\|dTs\|dTs\|dTs\|5mCs\|dTs\|oAs\|oGs\|o5mCs\|oTs\|L5mCs\|oTs\|oGs\|oA] |
| 628 | [oAs\|oTs\|5mCs\|5mCs\|dGs\|dGs\|dGs\|dTs\|dTs\|dTs\|5mCs\|dTs\|oAs\|oGs\|o5mCs\|LTs\|o5mCs\|oTs\|oGs\|oA] |
| 629 | [oAs\|oTs\|5mCs\|5mCs\|dGs\|dGs\|dGs\|dTs\|dTs\|dTs\|5mCs\|dTs\|oAs\|oGs\|L5mCs\|oTs\|o5mCs\|oTs\|oGs\|oA] |
| 630 | [oAs\|oTs\|5mCs\|5mCs\|dGs\|dGs\|dGs\|dTs\|dTs\|dTs\|5mCs\|dTs\|oAs\|LGs\|o5mCs\|oTs\|o5mCs\|oTs\|oGs\|oA] |
| 631 | [oAs\|LTs\|o5mCs\|o5mCs\|oGs\|oGs\|oGs\|dTs\|dTs\|dTs\|5mCs\|dTs\|dAs\|dGs\|5mCs\|dTs\|5mCs\|oTs\|oGs\|oA] |
| 632 | [oAs\|oTs\|L5mCs\|o5mCs\|oGs\|oGs\|oGs\|dTs\|dTs\|dTs\|5mCs\|dTs\|dAs\|dGs\|5mCs\|dTs\|5mCs\|oTs\|oGs\|oA] |
| 633 | [oAs\|oTs\|o5mCs\|L5mCs\|oGs\|oGs\|oGs\|dTs\|dTs\|dTs\|5mCs\|dTs\|dAs\|dGs\|5mCs\|dTs\|5mCs\|oTs\|oGs\|oA] |
| 634 | [oAs\|oTs\|o5mCs\|o5mCs\|LGs\|oGs\|oGs\|dTs\|dTs\|dTs\|5mCs\|dTs\|dAs\|dGs\|5mCs\|dTs\|5mCs\|oTs\|oGs\|oA] |
| 635 | [oAs\|oTs\|o5mCs\|o5mCs\|oGs\|LGs\|oGs\|dTs\|dTs\|dTs\|5mCs\|dTs\|dAs\|dGs\|5mCs\|dTs\|5mCs\|oTs\|oGs\|oA] |
| 636 | [oAs\|oTs\|o5mCs\|5mCs\|dGs\|dGs\|dGs\|dTs\|dTs\|dTs\|5mCs\|dTs\|dAs\|oGs\|o5mCs\|oTs\|o5mCs\|oTs\|LGs\|oA] |
| 637 | [oAs\|oTs\|o5mCs\|5mCs\|dGs\|dGs\|dGs\|dTs\|dTs\|dTs\|5mCs\|dTs\|dAs\|oGs\|o5mCs\|oTs\|o5mCs\|LTs\|oGs\|oA] |
| 638 | [oAs\|oTs\|o5mCs\|5mCs\|dGs\|dGs\|dGs\|dTs\|dTs\|dTs\|5mCs\|dTs\|dAs\|oGs\|o5mCs\|oTs\|L5mCs\|oTs\|oGs\|oA] |
| 639 | [oAs\|oTs\|o5mCs\|5mCs\|dGs\|dGs\|dGs\|dTs\|dTs\|dTs\|5mCs\|dTs\|dAs\|oGs\|o5mCs\|LTs\|o5mCs\|oTs\|oGs\|oA] |
| 640 | [oAs\|oTs\|o5mCs\|5mCs\|dGs\|dGs\|dGs\|dTs\|dTs\|dTs\|5mCs\|dTs\|dAs\|oGs\|L5mCs\|oTs\|o5mCs\|oTs\|oGs\|oA] |
| 641 | [oAs\|LTs\|o5mCs\|o5mCs\|oGs\|oGs\|oGs\|dTs\|dTs\|dTs\|5mCs\|dTs\|dAs\|dGs\|5mCs\|dTs\|5mCs\|oTs\|oG] |
| 642 | [oAs\|oTs\|L5mCs\|o5mCs\|oGs\|oGs\|oGs\|dTs\|dTs\|dTs\|5mCs\|dTs\|dAs\|dGs\|5mCs\|dTs\|5mCs\|oTs\|oG] |
| 643 | [oAs\|oTs\|o5mCs\|L5mCs\|oGs\|oGs\|oGs\|dTs\|dTs\|dTs\|5mCs\|dTs\|dAs\|dGs\|5mCs\|dTs\|5mCs\|oTs\|oG] |
| 644 | [oAs\|oTs\|o5mCs\|o5mCs\|LGs\|oGs\|oGs\|dTs\|dTs\|dTs\|5mCs\|dTs\|dAs\|dGs\|5mCs\|dTs\|5mCs\|oTs\|oG] |
| 645 | [oAs\|oTs\|o5mCs\|o5mCs\|oGs\|LGs\|oGs\|dTs\|dTs\|dTs\|5mCs\|dTs\|dAs\|dGs\|5mCs\|dTs\|5mCs\|oTs\|oG] |
| 646 | [oTs\|o5mCs\|5mCs\|dGs\|dGs\|dGs\|dTs\|dTs\|dTs\|5mCs\|dTs\|dAs\|oGs\|o5mCs\|oTs\|o5mCs\|oTs\|LGs\|oA] |
| 647 | [oTs\|o5mCs\|5mCs\|dGs\|dGs\|dGs\|dTs\|dTs\|dTs\|5mCs\|dTs\|dAs\|oGs\|o5mCs\|oTs\|o5mCs\|LTs\|oGs\|oA] |
| 648 | [oTs\|o5mCs\|5mCs\|dGs\|dGs\|dGs\|dTs\|dTs\|dTs\|5mCs\|dTs\|dAs\|oGs\|o5mCs\|oTs\|L5mCs\|oTs\|oGs\|oA] |
| 649 | [oTs\|o5mCs\|5mCs\|dGs\|dGs\|dGs\|dTs\|dTs\|dTs\|5mCs\|dTs\|dAs\|oGs\|o5mCs\|LTs\|o5mCs\|oTs\|oGs\|oA] |
| 650 | [oTs\|o5mCs\|5mCs\|dGs\|dGs\|dGs\|dTs\|dTs\|dTs\|5mCs\|dTs\|dAs\|oGs\|L5mCs\|oTs\|o5mCs\|oTs\|oGs\|oA] |
| 651 | [oAs\|LTs\|o5mCs\|o5mCs\|oGs\|oGs\|dGs\|dTs\|dTs\|dTs\|5mCs\|dTs\|dAs\|dGs\|5mCs\|dTs\|o5mCs\|oTs\|oGs\|oA] |
| 652 | [oAs\|oTs\|L5mCs\|o5mCs\|oGs\|oGs\|dGs\|dTs\|dTs\|dTs\|5mCs\|dTs\|dAs\|dGs\|5mCs\|dTs\|o5mCs\|oTs\|oGs\|oA] |
| 653 | [oAs\|oTs\|o5mCs\|L5mCs\|oGs\|oGs\|dGs\|dTs\|dTs\|dTs\|5mCs\|dTs\|dAs\|dGs\|5mCs\|dTs\|o5mCs\|oTs\|oGs\|oA] |
| 654 | [oAs\|oTs\|o5mCs\|o5mCs\|LGs\|oGs\|dGs\|dTs\|dTs\|dTs\|5mCs\|dTs\|dAs\|dGs\|5mCs\|dTs\|o5mCs\|oTs\|oGs\|oA] |
| 655 | [oAs\|oTs\|o5mCs\|o5mCs\|dGs\|dGs\|dGs\|dTs\|dTs\|dTs\|5mCs\|dTs\|dAs\|dGs\|o5mCs\|oTs\|o5mCs\|oTsILGs\|oA] |
| 656 | [oAs\|oTs\|o5mCs\|o5mCs\|dGs\|dGs\|dGs\|dTs\|dTs\|dTs\|5mCs\|dTs\|dAs\|dGs\|o5mCs\|oTs\|o5mCs\|LTs\|oGs\|oA] |
| 657 | [oAs\|oTs\|o5mCs\|o5mCs\|dGs\|dGs\|dGs\|dTs\|dTs\|dTs\|5mCs\|dTs\|dAs\|dGs\|o5mCs\|oTs\|L5mCs\|oTs\|oGs\|oA] |
| 658 | [oAs\|oTs\|o5mCs\|o5mCs\|dGs\|dGs\|dGs\|dTs\|dTs\|dTs\|5mCs\|dTs\|dAs\|dGs\|o5mCs\|LTs\|o5mCs\|oTs\|oGs\|oA] |
| 659 | [oAs\|LTs\|o5mCs\|o5mCs\|oGs\|oGs\|dGs\|dTs\|dTs\|dTs\|5mCs\|dTs\|dAs\|dGs\|5mCs\|dTs\|o5mCs\|oTs\|oG] |
| 660 | [oAs\|oTs\|L5mCs\|o5mCs\|oGs\|oGs\|dGs\|dTs\|dTs\|dTs\|5mCs\|dTs\|dAs\|dGs\|5mCs\|dTs\|o5mCs\|oTs\|oG] |
| 661 | [oAs\|oTs\|o5mCs\|L5mCs\|oGs\|oGs\|dGs\|dTs\|dTs\|dTs\|5mCs\|dTs\|dAs\|dGs\|5mCs\|dTs\|o5mCs\|oTs\|oG] |
| 662 | [oAs\|oTs\|o5mCs\|o5mCs\|LGs\|oGs\|dGs\|dTs\|dTs\|dTs\|5mCs\|dTs\|dAs\|dGs\|5mCs\|dTs\|o5mCs\|oTs\|oG] |
| 663 | [oAs\|oTs\|o5mCs\|5mCs\|dGs\|dGs\|dGs\|dTs\|dTs\|dTs\|5mCs\|dTs\|dAs\|dGs\|o5mCs\|oTs\|o5mCs\|oTs\|LGs\|oA] |
| 664 | [oAs\|oTs\|o5mCs\|5mCs\|dGs\|dGs\|dGs\|dTs\|dTs\|dTs\|5mCs\|dTs\|dAs\|dGs\|o5mCs\|oTs\|o5mCs\|LTs\|oGs\|oA] |
| 665 | [oAs\|oTs\|o5mCs\|5mCs\|dGs\|dGs\|dGs\|dTs\|dTs\|dTs\|5mCs\|dTs\|dAs\|dGs\|o5mCs\|oTs\|L5mCs\|oTs\|oGs\|oA] |
| 666 | [oAs\|LTs\|o5mCs\|o5mCs\|oGs\|oGs\|dGs\|dTs\|dTs\|dTs\|5mCs\|dTs\|dAs\|dGs\|5mCs\|dTs\|o5mCs\|oT] |
| 667 | [oAs\|oTs\|L5mCs\|o5mCs\|oGs\|oGs\|dGs\|dTs\|dTs\|dTs\|5mCs\|dTs\|dAs\|dGs\|5mCs\|dTs\|o5mCs\|oT] |
| 668 | [oAs\|oTs\|o5mCs\|L5mCs\|oGs\|oGs\|dGs\|dTs\|dTs\|dTs\|5mCs\|dTs\|dAs\|dGs\|5mCs\|dTs\|o5mCs\|oT] |
| 669 | [oAs\|oTs\|o5mCs\|o5mCs\|LGs\|oGs\|dGs\|dTs\|dTs\|dTs\|5mCs\|dTs\|dAs\|dGs\|5mCs\|dTs\|o5mCs\|oT] |
| 670 | [o5mCs\|o5mCs\|dGs\|dGs\|dGs\|dTs\|dTs\|dTs\|5mCs\|dTs\|dAs\|dGs\|o5mCs\|oTs\|o5mCs\|oTs\|LGs\|oA] |
| 671 | [o5mCs\|o5mCs\|dGs\|dGs\|dGs\|dTs\|dTs\|dTs\|5mCs\|dTs\|dAs\|dGs\|o5mCs\|oTs\|o5mCs\|LTs\|oGs\|oA] |
| 672 | [o5mCs\|o5mCs\|dGs\|dGs\|dGs\|dTs\|dTs\|dTs\|5mCs\|dTs\|dAs\|dGs\|o5mCs\|oTs\|L5mCs\|oTs\|oGs\|oA] |
| 673 | [o5mCs\|o5mCs\|dGs\|dGs\|dGs\|dTs\|dTs\|dTs\|5mCs\|dTs\|dAs\|dGs\|o5mCs\|LTs\|o5mCs\|oTs\|oGs\|oA] |
| 674 | [oAs\|LTs\|o5mCs\|o5mCs\|oGs\|dGs\|dGs\|dTs\|dTs\|dTs\|5mCs\|dTs\|dAs\|dGs\|5mCs\|oTs\|o5mCs\|oTs\|oGs\|oA] |
| 675 | [oAs\|oTs\|L5mCs\|o5mCs\|oGs\|dGs\|dGs\|dTs\|dTs\|dTs\|5mCs\|dTs\|dAs\|dGs\|5mCs\|oTs\|o5mCs\|oTs\|oGs\|oA] |
| 676 | [oAs\|oTs\|o5mCs\|L5mCs\|oGs\|dGs\|dGs\|dTs\|dTs\|dTs\|5mCs\|dTs\|dAs\|dGs\|5mCs\|oTs\|o5mCs\|oTs\|oGs\|oA] |
| 677 | [oAs\|oTs\|o5mCs\|o5mCs\|oGs\|dGs\|dGs\|dTs\|dTs\|dTs\|5mCs\|dTs\|dAs\|dGs\|5mCs\|oTs\|o5mCs\|oTs\|LGs\|oA] |
| 678 | [oAs\|oTs\|o5mCs\|o5mCs\|oGs\|dGs\|dGs\|dTs\|dTs\|dTs\|5mCs\|dTs\|dAs\|dGs\|5mCs\|oTs\|o5mCs\|LTs\|oGs\|oA] |
| 679 | [oAs\|oTs\|o5mCs\|o5mCs\|oGs\|dGs\|dGs\|dTs\|dTs\|dTs\|5mCs\|dTs\|dAs\|dGs\|5mCs\|oTs\|L5mCs\|oTs\|oGs\|oA] |
| 680 | [oAs\|LTs\|o5mCs\|o5mCs\|oGs\|dGs\|dGs\|dTs\|dTs\|dTs\|5mCs\|dTs\|dAs\|dGs\|5mCs\|oTs\|o5mCs\|oTs\|oG] |
| 681 | [oAs\|oTs\|L5mCs\|o5mCs\|oGs\|dGs\|dGs\|dTs\|dTs\|dTs\|5mCs\|dTs\|dAs\|dGs\|5mCs\|oTs\|o5mCs\|oTs\|oG] |
| 682 | [oAs\|oTs\|o5mCs\|L5mCs\|oGs\|dGs\|dGs\|dTs\|dTs\|dTs\|5mCs\|dTs\|dAs\|dGs\|5mCs\|oTs\|o5mCs\|oTs\|oG] |
| 683 | [oTs\|o5mCs\|o5mCs\|oGs\|dGs\|dGs\|dTs\|dTs\|dTs\|5mCs\|dTs\|dAs\|dGs\|5mCs\|oTs\|o5mCs\|oTs\|LGs\|oA] |
| 684 | [oTs\|o5mCs\|o5mCs\|oGs\|dGs\|dGs\|dTs\|dTs\|dTs\|5mCs\|dTs\|dAs\|dGs\|5mCs\|oTs\|o5mCs\|LTs\|oGs\|oA] |
| 685 | [oTs\|o5mCs\|o5mCs\|oGs\|dGs\|dGs\|dTs\|dTs\|dTs\|5mCs\|dTs\|dAs\|dGs\|5mCs\|oTs\|L5mCs\|oTs\|oGs\|oA] |
| 686 | [oAs\|LTs\|o5mCs\|o5mCs\|oGs\|dGs\|dGs\|dTs\|dTs\|dTs\|5mCs\|dTs\|dAs\|dGs\|5mCs\|oTs\|o5mCs\|oT] |
| 687 | [oAs\|oTs\|L5mCs\|o5mCs\|oGs\|dGs\|dGs\|dTs\|dTs\|dTs\|5mCs\|dTs\|dAs\|dGs\|5mCs\|oTs\|o5mCs\|oT] |
| 688 | [oAs\|oTs\|o5mCs\|L5mCs\|oGs\|dGs\|dGs\|dTs\|dTs\|dTs\|5mCs\|dTs\|dAs\|dGs\|5mCs\|oTs\|o5mCs\|oT] |
| 689 | [o5mCs\|o5mCs\|oGs\|dGs\|dGs\|dTs\|dTs\|dTs\|5mCs\|dTs\|dAs\|dGs\|5mCs\|oTs\|o5mCs\|oTs\|LGs\|oA] |
| 690 | [o5mCs\|o5mCs\|oGs\|dGs\|dGs\|dTs\|dTs\|dTs\|5mCs\|dTs\|dAs\|dGs\|5mCs\|oTs\|o5mCs\|LTs\|oGs\|oA] |
| 691 | [o5mCs\|o5mCs\|oGs\|dGs\|dGs\|dTs\|dTs\|dTs\|5mCs\|dTs\|dAs\|dGs\|5mCs\|oTs\|L5mCs\|oTs\|oGs\|oA] |
| 692 | [oAs\|LTs\|o5mCs\|o5mCs\|oGs\|dGs\|dGs\|dTs\|dTs\|dTs\|5mCs\|dTs\|dAs\|dGs\|5mCs\|oTs\|o5mC] |
| 693 | [oAs\|oTs\|L5mCs\|o5mCs\|oGs\|dGs\|dGs\|dTs\|dTs\|dTs\|5mCs\|dTs\|dAs\|dGs\|5mCs\|oTs\|o5mC] |
| 694 | [oAs\|oTs\|o5mCs\|L5mCs\|oGs\|dGs\|dGs\|dTs\|dTs\|dTs\|5mCs\|dTs\|dAs\|dGs\|5mCs\|oTs\|o5mC] |
| 695 | [o5mCs\|oGs\|dGs\|dGs\|dTs\|dTs\|dTs\|5mCs\|dTs\|dAs\|dGs\|5mCs\|oTs\|o5mCs\|oTs\|LGs\|oA] |
| 696 | [o5mCs\|oGs\|dGs\|dGs\|dTs\|dTs\|dTs\|5mCs\|dTs\|dAs\|dGs\|5mCs\|oTs\|o5mCs\|LTs\|oGs\|oA] |
| 697 | [o5mCs\|oGs\|dGs\|dGs\|dTs\|dTs\|dTs\|5mCs\|dTs\|dAs\|dGs\|5mCs\|oTs\|L5mCs\|oTs\|oGs\|oA] |
| 698 | [oTs\|L5mCs\|o5mCs\|oGs\|dGs\|dGs\|dTs\|dTs\|dTs\|5mCs\|dTs\|dAs\|dGs\|5mCs\|oTs\|o5mCs\|oTs\|oGs\|oA] |
| 699 | [oTs\|o5mCs\|L5mCs\|oGs\|dGs\|dGs\|dTs\|dTs\|dTs\|5mCs\|dTs\|dAs\|dGs\|5mCs\|oTs\|o5mCs\|oTs\|oGs\|oA] |
| 700 | [oAs\|oTs\|o5mCs\|o5mCs\|oGs\|dGs\|dGs\|dTs\|dTs\|dTs\|5mCs\|dTs\|dAs\|dGs\|5mCs\|oTs\|o5mCs\|LTs\|oG] |
| 701 | [oAs\|oTs\|o5mCs\|o5mCs\|oGs\|dGs\|dGs\|dTs\|dTs\|dTs\|5mCs\|dTs\|dAs\|dGs\|5mCs\|oTs\|L5mCs\|oTs\|oG] |
| 702 | [oTs\|L5mCs\|o5mCs\|oGs\|dGs\|dGs\|dTs\|dTs\|dTs\|5mCs\|dTs\|dAs\|dGs\|5mCs\|oTs\|o5mCs\|oTs\|oG] |
| 703 | [oTs\|o5mCs\|L5mCs\|oGs\|dGs\|dGs\|dTs\|dTs\|dTs\|5mCs\|dTs\|dAs\|dGs\|5mCs\|oTs\|o5mCs\|oTs\|oG] |
| 704 | [oTs\|o5mCs\|o5mCs\|oGs\|dGs\|dGs\|dTs\|dTs\|dTs\|5mCs\|dTs\|dAs\|dGs\|5mCs\|oTs\|o5mCs\|LTs\|oG] |
| 705 | [oTs\|o5mCs\|o5mCs\|oGs\|dGs\|dGs\|dTs\|dTs\|dTs\|5mCs\|dTs\|dAs\|dGs\|5mCs\|oTs\|L5mCs\|oTs\|oG] |
| 706 | [oTs\|L5mCs\|o5mCs\|oGs\|dGs\|dGs\|dTs\|dTs\|dTs\|5mCs\|dTs\|dAs\|dGs\|5mCs\|oTs\|o5mCs\|oT] |
| 707 | [oTs\|o5mCs\|L5mCs\|oGs\|dGs\|dGs\|dTs\|dTs\|dTs\|5mCs\|dTs\|dAs\|dGs\|5mCs\|oTs\|o5mCs\|oT] |
| 708 | [oTs\|o5mCs\|o5mCs\|oGs\|dGs\|dGs\|dTs\|dTs\|dTs\|5mCs\|dTs\|dAs\|dGs\|5mCs\|oTs\|L5mCs\|oT] |
| 709 | [oAs\|oTs\|o5mCs\|o5mCs\|oGs\|oGs\|oGs\|oTs\|dTs\|dTs\|5mCs\|dTs\|dAs\|dGs\|5mCs\|dTs\|5mCs\|dTs\|oGs\|oA] |
| 710 | [oAs\|oTs\|5mCs\|5mCs\|dGs\|dGs\|dGs\|dTs\|dTs\|dTs\|5mCs\|dTs\|oAs\|oGs\|o5mCs\|oTs\|o5mCs\|oTs\|oGs\|oA] |
| 711 | [oAs\|oTs\|o5mCs\|o5mCs\|oGs\|oGs\|oGs\|dTs\|dTs\|dTs\|5mCs\|dTs\|dAs\|dGs\|5mCs\|dTs\|5mCs\|oTs\|oGs\|oA] |
| 712 | [oAs\|oTs\|o5mCs\|5mCs\|dGs\|dGs\|dGs\|dTs\|dTs\|dTs\|5mCs\|dTs\|dAs\|oGs\|o5mCs\|oTs\|o5mCs\|oTs\|oGs\|oA] |
| 713 | [oAs\|oTs\|o5mCs\|o5mCs\|oGs\|oGs\|oGs\|dTs\|dTs\|dTs\|5mCs\|dTs\|dAs\|dGs\|5mCs\|dTs\|5mCs\|oTs\|oG] |
| 714 | [oTs\|o5mCs\|5mCs\|dGs\|dGs\|dGs\|dTs\|dTs\|dTs\|5mCs\|dTs\|dAs\|oGs\|o5mCs\|oTs\|o5mCs\|oTs\|oGs\|oA] |
| 715 | [oAs\|oTs\|o5mCs\|o5mCs\|oGs\|oGs\|dGs\|dTs\|dTs\|dTs\|5mCs\|dTs\|dAs\|dGs\|5mCs\|dTs\|o5mCs\|oTs\|oGs\|oA] |
| 716 | [oAs\|oTs\|o5mCs\|o5mCs\|dGs\|dGs\|dGs\|dTs\|dTs\|dTs\|5mCs\|dTs\|dAs\|dGs\|o5mCs\|oTs\|o5mCs\|oTs\|oGs\|oA] |
| 717 | [oAs\|oTs\|o5mCs\|o5mCs\|oGs\|oGs\|dGs\|dTs\|dTs\|dTs\|5mCs\|dTs\|dAs\|dGs\|5mCs\|dTs\|o5mCs\|oTs\|oG] |
| 718 | [oAs\|oTs\|o5mCs\|5mCs\|dGs\|dGs\|dGs\|dTs\|dTs\|dTs\|5mCs\|dTs\|dAs\|dGs\|o5mCs\|oTs\|o5mCs\|oTs\|oGs\|oA] |
| 719 | [oAs\|oTs\|o5mCs\|o5mCs\|oGs\|oGs\|dGs\|dTs\|dTs\|dTs\|5mCs\|dTs\|dAs\|dGs\|5mCs\|dTs\|o5mCs\|oT] |
| 720 | [o5mCs\|o5mCs\|dGs\|dGs\|dGs\|dTs\|dTs\|dTs\|5mCs\|dTs\|dAs\|dGs\|o5mCs\|oTs\|o5mCs\|oTs\|oGs\|oA] |
| 721 | [oAs\|oTs\|o5mCs\|o5mCs\|oGs\|dGs\|dGs\|dTs\|dTs\|dTs\|5mCs\|dTs\|dAs\|dGs\|5mCs\|oTs\|o5mCs\|oTs\|oGs\|oA] |
| 722 | [oAs\|oTs\|o5mCs\|o5mCs\|oGs\|dGs\|dGs\|dTs\|dTs\|dTs\|5mCs\|dTs\|dAs\|dGs\|5mCs\|oTs\|o5mCs\|oTs\|oG] |
| 723 | [oAs\|oTs\|o5mCs\|o5mCs\|oGs\|dGs\|dGs\|dTs\|dTs\|dTs\|5mCs\|dTs\|dAs\|dGs\|5mCs\|oTs\|o5mCs\|oT] |
| 724 | [o5mCs\|o5mCs\|oGs\|dGs\|dGs\|dTs\|dTs\|dTs\|5mCs\|dTs\|dAs\|dGs\|5mCs\|oTs\|o5mCs\|oTs\|oGs\|oA] |
| 725 | [oAs\|oTs\|o5mCs\|o5mCs\|oGs\|dGs\|dGs\|dTs\|dTs\|dTs\|5mCs\|dTs\|dAs\|dGs\|5mCs\|oTs\|o5mC] |
| 726 | [o5mCs\|oGs\|dGs\|dGs\|dTs\|dTs\|dTs\|5mCs\|dTs\|dAs\|dGs\|5mCs\|oTs\|o5mCs\|oTs\|oGs\|oA] |
| 727 | [oTs\|o5mCs\|o5mCs\|oGs\|dGs\|dGs\|dTs\|dTs\|dTs\|5mCs\|dTs\|dAs\|dGs\|5mCs\|oTs\|o5mCs\|oTs\|oGs\|oA] |
| 728 | [oTs\|o5mCs\|o5mCs\|oGs\|dGs\|dGs\|dTs\|dTs\|dTs\|5mCs\|dTs\|dAs\|dGs\|5mCs\|oTs\|o5mCs\|oTs\|oG] |
| 729 | [oTs\|o5mCs\|o5mCs\|oGs\|dGs\|dGs\|dTs\|dTs\|dTs\|5mCs\|dTs\|dAs\|dGs\|5mCs\|oTs\|o5mCs\|oT] |
| 730 | [oAs\|oTs\|o5mCp\|o5mCs\|oGs\|dGs\|dGs\|dTs\|dTs\|dTs\|5mCs\|dTs\|dAs\|dGs\|5mCs\|oTs\|o5mCs\|oTs\|oGs\|oA] |
| 731 | [oAs\|oTs\|o5mCs\|o5mCp\|oGs\|dGs\|dGs\|dTs\|dTs\|dTs\|5mCs\|dTs\|dAs\|dGs\|5mCs\|oTs\|o5mCs\|oTs\|oGs\|oA] |
| 732 | [oAs\|oTs\|o5mCp\|o5mCp\|oGs\|dGs\|dGs\|dTs\|dTs\|dTs\|5mCs\|dTs\|dAs\|dGs\|5mCs\|oTs\|o5mCs\|oTs\|oGs\|oA] |
| 733 | [oAs\|oTs\|o5mCs\|o5mCs\|oGs\|dGs\|dGs\|dTs\|dTs\|dTs\|5mCs\|dTs\|dAs\|dGs\|5mCs\|oTs\|o5mCp\|oTs\|oGs\|oA] |
| 734 | [oAs\|oTs\|o5mCs\|o5mCs\|oGs\|dGs\|dGs\|dTs\|dTs\|dTs\|5mCs\|dTs\|dAs\|dGs\|5mCs\|oTp\|o5mCs\|oTs\|oGs\|oA] |
| 735 | [oAs\|oTs\|o5mCs\|o5mCs\|oGs\|dGs\|dGs\|dTs\|dTs\|dTs\|5mCs\|dTs\|dAs\|dGs\|5mCs\|oTp\|o5mCp\|oTs\|oGs\|oA] |
| 736 | [oAs\|oTs\|o5mCp\|o5mCs\|oGs\|dGs\|dGs\|dTs\|dTs\|dTs\|5mCs\|dTs\|dAs\|dGs\|5mCs\|oTs\|o5mCp\|oTs\|oGs\|oA] |
| 737 | [oAs\|oTs\|o5mCp\|o5mCs\|oGs\|dGs\|dGs\|dTs\|dTs\|dTs\|5mCs\|dTs\|dAs\|dGs\|5mCs\|oTp\|o5mCs\|oTs\|oGs\|oA] |
| 738 | [oAs\|oTs\|o5mCs\|o5mCp\|oGs\|dGs\|dGs\|dTs\|dTs\|dTs\|5mCs\|dTs\|dAs\|dGs\|5mCs\|oTs\|o5mCp\|oTs\|oGs\|oA] |
| 739 | [oAs\|oTs\|o5mCs\|o5mCp\|oGs\|dGs\|dGs\|dTs\|dTs\|dTs\|5mCs\|dTs\|dAs\|dGs\|5mCs\|oTp\|o5mCs\|oTs\|oGs\|oA] |
| 740 | [oAs\|oTs\|o5mCp\|o5mCs\|oGs\|dGs\|dGs\|dTs\|dTs\|dTs\|5mCs\|dTs\|dAs\|dGs\|5mCs\|oTp\|o5mCp\|oTs\|oGs\|oA] |
| 741 | [oAs\|oTs\|o5mCs\|o5mCp\|oGs\|dGs\|dGs\|dTs\|dTs\|dTs\|5mCs\|dTs\|dAs\|dGs\|5mCs\|oTp\|o5mCp\|oTs\|oGs\|oA] |
| 742 | [oAs\|oTs\|o5mCp\|o5mCp\|oGs\|dGs\|dGs\|dTs\|dTs\|dTs\|5mCs\|dTs\|dAs\|dGs\|5mCs\|oTs\|o5mCp\|oTs\|oGs\|oA] |
| 743 | [oAs\|oTs\|o5mCp\|o5mCp\|oGs\|dGs\|dGs\|dTs\|dTs\|dTs\|5mCs\|dTs\|dAs\|dGs\|5mCs\|oTp\|o5mCs\|oTs\|oGs\|oA] |
| 744 | [oAs\|oTs\|o5mCp\|o5mCp\|oGs\|dGs\|dGs\|dTs\|dTs\|dTs\|5mCs\|dTs\|dAs\|dGs\|5mCs\|oTp\|o5mCp\|oTs\|oGs\|oA] |
| 745 | [oAs\|oTs\|o5mCs\|o5mCs\|oGs\|dGs\|dGs\|dTs\|dTs\|dTs\|5mCs\|dTs\|dAs\|dGs\|5mCs\|oTs\|o5mCs\|oTs\|oGs\|oAs\|oA] |
| 746 | [oAs\|oTs\|o5mCp\|o5mCs\|oGs\|dGs\|dGs\|dTs\|dTs\|dTs\|5mCs\|dTs\|dAs\|dGs\|5mCs\|oTs\|o5mCs\|oTs\|oGs\|oAs\|oA] |
| 747 | [oAs\|oTs\|o5mCs\|o5mCp\|oGs\|dGs\|dGs\|dTs\|dTs\|dTs\|5mCs\|dTs\|dAs\|dGs\|5mCs\|oTs\|o5mCs\|oTs\|oGs\|oAs\|oA] |
| 748 | [oAs\|oTs\|o5mCp\|o5mCp\|oGs\|dGs\|dGs\|dTs\|dTs\|dTs\|5mCs\|dTs\|dAs\|dGs\|5mCs\|oTs\|o5mCs\|oTs\|oGs\|oAs\|oA] |
| 749 | [oAs\|oTs\|o5mCs\|o5mCs\|oGs\|dGs\|dGs\|dTs\|dTs\|dTs\|5mCs\|dTs\|dAs\|dGs\|5mCs\|oTs\|o5mCp\|oTs\|oGs\|oAs\|oA] |
| 750 | [oAs\|oTs\|o5mCs\|o5mCs\|oGs\|dGs\|dGs\|dTs\|dTs\|dTs\|5mCs\|dTs\|dAs\|dGs\|5mCs\|oTp\|o5mCs\|oTs\|oGs\|oAs\|oA] |
| 751 | [oAs\|oTs\|o5mCs\|o5mCs\|oGs\|dGs\|dGs\|dTs\|dTs\|dTs\|5mCs\|dTs\|dAs\|dGs\|5mCs\|oTp\|o5mCp\|oTs\|oGs\|oAs\|oA] |
| 752 | [oAs\|oTs\|o5mCp\|o5mCs\|oGs\|dGs\|dGs\|dTs\|dTs\|dTs\|5mCs\|dTs\|dAs\|dGs\|5mCs\|oTs\|o5mCp\|oTs\|oGs\|oAs\|oA] |
| 753 | [oAs\|oTs\|o5mCp\|o5mCs\|oGs\|dGs\|dGs\|dTs\|dTs\|dTs\|5mCs\|dTs\|dAs\|dGs\|5mCs\|oTp\|o5mCs\|oTs\|oGs\|oAs\|oA] |
| 754 | [oAs\|oTs\|o5mCs\|o5mCp\|oGs\|dGs\|dGs\|dTs\|dTs\|dTs\|5mCs\|dTs\|dAs\|dGs\|5mCs\|oTs\|o5mCp\|oTs\|oGs\|oAs\|oA] |
| 755 | [oAs\|oTs\|o5mCs\|o5mCp\|oGs\|dGs\|dGs\|dTs\|dTs\|dTs\|5mCs\|dTs\|dAs\|dGs\|5mCs\|oTp\|o5mCs\|oTs\|oGs\|oAs\|oA] |
| 756 | [oAs\|oTs\|o5mCp\|o5mCs\|oGs\|dGs\|dGs\|dTs\|dTs\|dTs\|5mCs\|dTs\|dAs\|dGs\|5mCs\|oTp\|o5mCp\|oTs\|oGs\|oAs\|oA] |
| 757 | [oAs\|oTs\|o5mCs\|o5mCp\|oGs\|dGs\|dGs\|dTs\|dTs\|dTs\|5mCs\|dTs\|dAs\|dGs\|5mCs\|oTp\|o5mCp\|oTs\|oGs\|oAs\|oA] |
| 758 | [oAs\|oTs\|o5mCp\|o5mCp\|oGs\|dGs\|dGs\|dTs\|dTs\|dTs\|5mCs\|dTs\|dAs\|dGs\|5mCs\|oTs\|o5mCp\|oTs\|oGs\|oAs\|oA] |
| 759 | [oAs\|oTs\|o5mCp\|o5mCp\|oGs\|dGs\|dGs\|dTs\|dTs\|dTs\|5mCs\|dTs\|dAs\|dGs\|5mCs\|oTp\|o5mCs\|oTs\|oGs\|oAs\|oA] |
| 760 | [oAs\|oTs\|o5mCp\|o5mCp\|oGs\|dGs\|dGs\|dTs\|dTs\|dTs\|5mCs\|dTs\|dAs\|dGs\|5mCs\|oTp\|o5mCp\|oTs\|oGs\|oAs\|oA] |
| 761 | [oAs\|oTs\|o5mCs\|o5mCs\|oGs\|dGs\|dGs\|dTs\|dTs\|dTs\|5mCs\|dTs\|dAs\|dGs\|5mCs\|oTs\|o5mCs\|oTs\|oGs\|oAs\|oAs\|o5mC] |
| 762 | [oAs\|oTs\|o5mCp\|o5mCs\|oGs\|dGs\|dGs\|dTs\|dTs\|dTs\|5mCs\|dTs\|dAs\|dGs\|5mCs\|oTs\|o5mCs\|oTs\|oGs\|oAs\|oAs\|o5mC] |
| 763 | [oAs\|oTs\|o5mCs\|o5mCp\|oGs\|dGs\|dGs\|dTs\|dTs\|dTs\|5mCs\|dTs\|dAs\|dGs\|5mCs\|oTs\|o5mCs\|oTs\|oGs\|oAs\|oAs\|o5mC] |
| 764 | [oAs\|oTs\|o5mCp\|o5mCp\|oGs\|dGs\|dGs\|dTs\|dTs\|dTs\|5mCs\|dTs\|dAs\|dGs\|5mCs\|oTs\|o5mCs\|oTs\|oGs\|oAs\|oAs\|o5mC] |
| 765 | [oAs\|oTs\|o5mCs\|o5mCs\|oGs\|dGs\|dGs\|dTs\|dTs\|dTs\|5mCs\|dTs\|dAs\|dGs\|5mCs\|oTs\|o5mCp\|oTs\|oGs\|oAs\|oAs\|o5mC] |
| 766 | [oAs\|oTs\|o5mCs\|o5mCs\|oGs\|dGs\|dGs\|dTs\|dTs\|dTs\|5mCs\|dTs\|dAs\|dGs\|5mCs\|oTp\|o5mCs\|oTs\|oGs\|oAs\|oAs\|o5mC] |
| 767 | [oAs\|oTs\|o5mCs\|o5mCs\|oGs\|dGs\|dGs\|dTs\|dTs\|dTs\|5mCs\|dTs\|dAs\|dGs\|5mCs\|oTp\|o5mCp\|oTs\|oGs\|oAs\|oAs\|o5mC] |
| 768 | [oAs\|oTs\|o5mCp\|o5mCs\|oGs\|dGs\|dGs\|dTs\|dTs\|dTs\|5mCs\|dTs\|dAs\|dGs\|5mCs\|oTs\|o5mCp\|oTs\|oGs\|oAs\|oAs\|o5mC] |
| 769 | [oAs\|oTs\|o5mCp\|o5mCs\|oGs\|dGs\|dGs\|dTs\|dTs\|dTs\|5mCs\|dTs\|dAs\|dGs\|5mCs\|oTp\|o5mCs\|oTs\|oGs\|oAs\|oAs\|o5mC] |
| 770 | [oAs\|oTs\|o5mCs\|o5mCp\|oGs\|dGs\|dGs\|dTs\|dTs\|dTs\|5mCs\|dTs\|dAs\|dGs\|5mCs\|oTs\|o5mCp\|oTs\|oGs\|oAs\|oAs\|o5mC] |
| 771 | [oAs\|oTs\|o5mCs\|o5mCp\|oGs\|dGs\|dGs\|dTs\|dTs\|dTs\|5mCs\|dTs\|dAs\|dGs\|5mCs\|oTp\|o5mCs\|oTs\|oGs\|oAs\|oAs\|o5mC] |
| 772 | [oAs\|oTs\|o5mCp\|o5mCs\|oGs\|dGs\|dGs\|dTs\|dTs\|dTs\|5mCs\|dTs\|dAs\|dGs\|5mCs\|oTp\|o5mCp\|oTs\|oGs\|oAs\|oAs\|o5mC] |
| 773 | [oAs\|oTs\|o5mCs\|o5mCp\|oGs\|dGs\|dGs\|dTs\|dTs\|dTs\|5mCs\|dTs\|dAs\|dGs\|5mCs\|oTp\|o5mCp\|oTs\|oGs\|oAs\|oAs\|o5mC] |
| 774 | [oAs\|oTs\|o5mCp\|o5mCp\|oGs\|dGs\|dGs\|dTs\|dTs\|dTs\|5mCs\|dTs\|dAs\|dGs\|5mCs\|oTs\|o5mCp\|oTs\|oGs\|oAs\|oAs\|o5mC] |
| 775 | [oAs\|oTs\|o5mCp\|o5mCp\|oGs\|dGs\|dGs\|dTs\|dTs\|dTs\|5mCs\|dTs\|dAs\|dGs\|5mCs\|oTp\|o5mCs\|oTs\|oGs\|oAs\|oAs\|o5mC] |
| 776 | [oAs\|oTs\|o5mCp\|o5mCp\|oGs\|dGs\|dGs\|dTs\|dTs\|dTs\|5mCs\|dTs\|dAs\|dGs\|5mCs\|oTp\|o5mCp\|oTs\|oGs\|oAs\|oAs\|o5mC] |
| 777 | [oAs\|oTs\|o5mCs\|o5mCs\|oGs\|dGs\|dGs\|dTs\|dTs\|dTs\|5mCs\|dTs\|dAs\|dGs\|5mCs\|oTs\|o5mCs\|oTs\|oGs\|oAs\|oAs\|o5mCs\|oG] |
| 778 | [oAs\|oTs\|o5mCp\|o5mCs\|oGs\|dGs\|dGs\|dTs\|dTs\|dTs\|5mCs\|dTs\|dAs\|dGs\|5mCs\|oTs\|o5mCs\|oTs\|oGs\|oAs\|oAs\|o5mCs\|oG] |
| 779 | [oAs\|oTs\|o5mCs\|o5mCp\|oGs\|dGs\|dGs\|dTs\|dTs\|dTs\|5mCs\|dTs\|dAs\|dGs\|5mCs\|oTs\|o5mCs\|oTs\|oGs\|oAs\|oAs\|o5mCs\|oG] |
| 780 | [oAs\|oTs\|o5mCp\|o5mCp\|oGs\|dGs\|dGs\|dTs\|dTs\|dTs\|5mCs\|dTs\|dAs\|dGs\|5mCs\|oTs\|o5mCs\|oTs\|oGs\|oAs\|oAs\|o5mCs\|oG] |
| 781 | [oAs\|oTs\|o5mCs\|o5mCs\|oGs\|dGs\|dGs\|dTs\|dTs\|dTs\|5mCs\|dTs\|dAs\|dGs\|5mCs\|oTs\|o5mCp\|oTs\|oGs\|oAs\|oAs\|o5mCs\|oG] |
| 782 | [oAs\|oTs\|o5mCs\|o5mCs\|oGs\|dGs\|dGs\|dTs\|dTs\|dTs\|5mCs\|dTs\|dAs\|dGs\|5mCs\|oTp\|o5mCs\|oTs\|oGs\|oAs\|oAs\|o5mCs\|oG] |
| 783 | [oAs\|oTs\|o5mCs\|o5mCs\|oGs\|dGs\|dGs\|dTs\|dTs\|dTs\|5mCs\|dTs\|dAs\|dGs\|5mCs\|oTp\|o5mCp\|oTs\|oGs\|oAs\|oAs\|o5mCs\|oG] |
| 784 | [oAs\|oTs\|o5mCp\|o5mCs\|oGs\|dGs\|dGs\|dTs\|dTs\|dTs\|5mCs\|dTs\|dAs\|dGs\|5mCs\|oTs\|o5mCp\|oTs\|oGs\|oAs\|oAs\|o5mCs\|oG] |
| 785 | [oAs\|oTs\|o5mCp\|o5mCs\|oGs\|dGs\|dGs\|dTs\|dTs\|dTs\|5mCs\|dTs\|dAs\|dGs\|5mCs\|oTp\|o5mCs\|oTs\|oGs\|oAs\|oAs\|o5mCs\|oG] |
| 786 | [oAs\|oTs\|o5mCs\|o5mCp\|oGs\|dGs\|dGs\|dTs\|dTs\|dTs\|5mCs\|dTs\|dAs\|dGs\|5mCs\|oTs\|o5mCp\|oTs\|oGs\|oAs\|oAs\|o5mCs\|oG] |
| 787 | [oAs\|oTs\|o5mCs\|o5mCp\|oGs\|dGs\|dGs\|dTs\|dTs\|dTs\|5mCs\|dTs\|dAs\|dGs\|5mCs\|oTp\|o5mCs\|oTs\|oGs\|oAs\|oAs\|o5mCs\|oG] |
| 788 | [oAs\|oTs\|o5mCp\|o5mCs\|oGs\|dGs\|dGs\|dTs\|dTs\|dTs\|5mCs\|dTs\|dAs\|dGs\|5mCs\|oTp\|o5mCp\|oTs\|oGs\|oAs\|oAs\|o5mCs\|oG] |
| 789 | [oAs\|oTs\|o5mCs\|o5mCp\|oGs\|dGs\|dGs\|dTs\|dTs\|dTs\|5mCs\|dTs\|dAs\|dGs\|5mCs\|oTp\|o5mCp\|oTs\|oGs\|oAs\|oAs\|o5mCs\|oG] |
| 790 | [oAs\|oTs\|o5mCp\|o5mCp\|oGs\|dGs\|dGs\|dTs\|dTs\|dTs\|5mCs\|dTs\|dAs\|dGs\|5mCs\|oTs\|o5mCp\|oTs\|oGs\|oAs\|oAs\|o5mCs\|oG] |
| 791 | [oAs\|oTs\|o5mCp\|o5mCp\|oGs\|dGs\|dGs\|dTs\|dTs\|dTs\|5mCs\|dTs\|dAs\|dGs\|5mCs\|oTp\|o5mCs\|oTs\|oGs\|oAs\|oAs\|o5mCs\|oG] |
| 792 | [oAs\|oTs\|o5mCp\|o5mCp\|oGs\|dGs\|dGs\|dTs\|dTs\|dTs\|5mCs\|dTs\|dAs\|dGs\|5mCs\|oTp\|o5mCp\|oTs\|oGs\|oAs\|oAs\|o5mCs\|oG] |
| 793 | [oAs\|oTs\|o5mCs\|o5mCs\|oGs\|dGs\|dGs\|dTs\|dTs\|dTs\|5mCs\|dTs\|dAs\|dGs\|5mCs\|dTs\|o5mCs\|oTs\|oGs\|oAs\|oA] |
| 794 | [oAs\|oTs\|o5mCp\|o5mCs\|oGs\|dGs\|dGs\|dTs\|dTs\|dTs\|5mCs\|dTs\|dAs\|dGs\|5mCs\|dTs\|o5mCs\|oTs\|oGs\|oAs\|oA] |
| 795 | [oAs\|oTs\|o5mCs\|o5mCp\|oGs\|dGs\|dGs\|dTs\|dTs\|dTs\|5mCs\|dTs\|dAs\|dGs\|5mCs\|dTs\|o5mCs\|oTs\|oGs\|oAs\|oA] |
| 796 | [oAs\|oTs\|o5mCp\|o5mCp\|oGs\|dGs\|dGs\|dTs\|dTs\|dTs\|5mCs\|dTs\|dAs\|dGs\|5mCs\|dTs\|o5mCs\|oTs\|oGs\|oAs\|oA] |
| 797 | [oAs\|oTs\|o5mCs\|o5mCs\|oGs\|dGs\|dGs\|dTs\|dTs\|dTs\|5mCs\|dTs\|dAs\|dGs\|5mCs\|dTs\|o5mCp\|oTs\|oGs\|oAs\|oA] |
| 798 | [oAs\|oTs\|o5mCs\|o5mCs\|oGs\|dGs\|dGs\|dTs\|dTs\|dTs\|5mCs\|dTs\|dAs\|dGs\|5mCs\|dTp\|o5mCs\|oTs\|oGs\|oAs\|oA] |
| 799 | [oAs\|oTs\|o5mCs\|o5mCs\|oGs\|dGs\|dGs\|dTs\|dTs\|dTs\|5mCs\|dTs\|dAs\|dGs\|5mCs\|dTp\|o5mCp\|oTs\|oGs\|oAs\|oA] |
| 800 | [oAs\|oTs\|o5mCp\|o5mCs\|oGs\|dGs\|dGs\|dTs\|dTs\|dTs\|5mCs\|dTs\|dAs\|dGs\|5mCs\|dTs\|o5mCp\|oTs\|oGs\|oAs\|oA] |
| 801 | [oAs\|oTs\|o5mCp\|o5mCs\|oGs\|dGs\|dGs\|dTs\|dTs\|dTs\|5mCs\|dTs\|dAs\|dGs\|5mCs\|dTp\|o5mCs\|oTs\|oGs\|oAs\|oA] |
| 802 | [oAs\|oTs\|o5mCs\|o5mCp\|oGs\|dGs\|dGs\|dTs\|dTs\|dTs\|5mCs\|dTs\|dAs\|dGs\|5mCs\|dTs\|o5mCp\|oTs\|oGs\|oAs\|oA] |
| 803 | [oAs\|oTs\|o5mCs\|o5mCp\|oGs\|dGs\|dGs\|dTs\|dTs\|dTs\|5mCs\|dTs\|dAs\|dGs\|5mCs\|dTp\|o5mCs\|oTs\|oGs\|oAs\|oA] |
| 804 | [oAs\|oTs\|o5mCp\|o5mCs\|oGs\|dGs\|dGs\|dTs\|dTs\|dTs\|5mCs\|dTs\|dAs\|dGs\|5mCs\|dTp\|o5mCp\|oTs\|oGs\|oAs\|oA] |
| 805 | [oAs\|oTs\|o5mCs\|o5mCp\|oGs\|dGs\|dGs\|dTs\|dTs\|dTs\|5mCs\|dTs\|dAs\|dGs\|5mCs\|dTp\|o5mCp\|oTs\|oGs\|oAs\|oA] |
| 806 | [oAs\|oTs\|o5mCp\|o5mCp\|oGs\|dGs\|dGs\|dTs\|dTs\|dTs\|5mCs\|dTs\|dAs\|dGs\|5mCs\|dTs\|o5mCp\|oTs\|oGs\|oAs\|oA] |
| 807 | [oAs\|oTs\|o5mCp\|o5mCp\|oGs\|dGs\|dGs\|dTs\|dTs\|dTs\|5mCs\|dTs\|dAs\|dGs\|5mCs\|dTp\|o5mCs\|oTs\|oGs\|oAs\|oA] |
| 808 | [oAs\|oTs\|o5mCp\|o5mCp\|oGs\|dGs\|dGs\|dTs\|dTs\|dTs\|5mCs\|dTs\|dAs\|dGs\|5mCs\|dTp\|o5mCp\|oTs\|oGs\|oAs\|oA] |
| 809 | [oAs\|oTs\|o5mCs\|o5mCs\|oGs\|dGs\|dGs\|dTs\|dTs\|dTs\|5mCs\|dTs\|dAs\|dGs\|5mCs\|dTs\|5mCs\|oTs\|oGs\|oAs\|oAs\|o5mC] |
| 810 | [oAs\|oTs\|o5mCp\|o5mCs\|oGs\|dGs\|dGs\|dTs\|dTs\|dTs\|5mCs\|dTs\|dAs\|dGs\|5mCs\|dTs\|5mCs\|oTs\|oGs\|oAs\|oAs\|o5mC] |
| 811 | [oAs\|oTs\|o5mCs\|o5mCp\|oGs\|dGs\|dGs\|dTs\|dTs\|dTs\|5mCs\|dTs\|dAs\|dGs\|5mCs\|dTs\|5mCs\|oTs\|oGs\|oAs\|oAs\|o5mC] |
| 812 | [oAs\|oTs\|o5mCp\|o5mCp\|oGs\|dGs\|dGs\|dTs\|dTs\|dTs\|5mCs\|dTs\|dAs\|dGs\|5mCs\|dTs\|5mCs\|oTs\|oGs\|oAs\|oAs\|o5mC] |
| 813 | [oAs\|oTs\|o5mCs\|o5mCs\|oGs\|dGs\|dGs\|dTs\|dTs\|dTs\|5mCs\|dTs\|dAs\|dGs\|5mCs\|dTs\|5mCp\|oTs\|oGs\|oAs\|oAs\|o5mC] |
| 814 | [oAs\|oTs\|o5mCs\|o5mCs\|oGs\|dGs\|dGs\|dTs\|dTs\|dTs\|5mCs\|dTs\|dAs\|dGs\|5mCs\|dTp\|5mCs\|oTs\|oGs\|oAs\|oAs\|o5mC] |
| 815 | [oAs\|oTs\|o5mCs\|o5mCs\|oGs\|dGs\|dGs\|dTs\|dTs\|dTs\|5mCs\|dTs\|dAs\|dGs\|5mCs\|dTp\|5mCp\|oTs\|oGs\|oAs\|oAs\|o5mC] |
| 816 | [oAs\|oTs\|o5mCp\|o5mCs\|oGs\|dGs\|dGs\|dTs\|dTs\|dTs\|5mCs\|dTs\|dAs\|dGs\|5mCs\|dTs\|5mCp\|oTs\|oGs\|oAs\|oAs\|o5mC] |
| 817 | [oAs\|oTs\|o5mCp\|o5mCs\|oGs\|dGs\|dGs\|dTs\|dTs\|dTs\|5mCs\|dTs\|dAs\|dGs\|5mCs\|dTp\|5mCs\|oTs\|oGs\|oAs\|oAs\|o5mC] |
| 818 | [oAs\|oTs\|o5mCs\|o5mCp\|oGs\|dGs\|dGs\|dTs\|dTs\|dTs\|5mCs\|dTs\|dAs\|dGs\|5mCs\|dTs\|5mCp\|oTs\|oGs\|oAs\|oAs\|o5mC] |
| 819 | [oAs\|oTs\|o5mCs\|o5mCp\|oGs\|dGs\|dGs\|dTs\|dTs\|dTs\|5mCs\|dTs\|dAs\|dGs\|5mCs\|dTp\|5mCs\|oTs\|oGs\|oAs\|oAs\|o5mC] |
| 820 | [oAs\|oTs\|o5mCp\|o5mCs\|oGs\|dGs\|dGs\|dTs\|dTs\|dTs\|5mCs\|dTs\|dAs\|dGs\|5mCs\|dTp\|5mCp\|oTs\|oGs\|oAs\|oAs\|o5mC] |
| 821 | [oAs\|oTs\|o5mCs\|o5mCp\|oGs\|dGs\|dGs\|dTs\|dTs\|dTs\|5mCs\|dTs\|dAs\|dGs\|5mCs\|dTp\|5mCp\|oTs\|oGs\|oAs\|oAs\|o5mC] |
| 822 | [oAs\|oTs\|o5mCp\|o5mCp\|oGs\|dGs\|dGs\|dTs\|dTs\|dTs\|5mCs\|dTs\|dAs\|dGs\|5mCs\|dTs\|5mCp\|oTs\|oGs\|oAs\|oAs\|o5mC] |
| 823 | [oAs\|oTs\|o5mCp\|o5mCp\|oGs\|dGs\|dGs\|dTs\|dTs\|dTs\|5mCs\|dTs\|dAs\|dGs\|5mCs\|dTp\|5mCs\|oTs\|oGs\|oAs\|oAs\|o5mC] |
| 824 | [oAs\|oTs\|o5mCp\|o5mCp\|oGs\|dGs\|dGs\|dTs\|dTs\|dTs\|5mCs\|dTs\|dAs\|dGs\|5mCs\|dTp\|5mCp\|oTs\|oGs\|oAs\|oAs\|o5mC] |
| 825 | [o5mCs\|LAs\|oTs\|o5mCs\|o5mCs\|oGs\|oGs\|oGs\|dTs\|dTs\|dTs\|5mCs\|dTs\|dAs\|dGs\|5mCs\|dTs\|5mCs\|oTs\|oG] |
| 826 | [o5mCs\|oAs\|LTs\|o5mCs\|o5mCs\|oGs\|oGs\|oGs\|dTs\|dTs\|dTs\|5mCs\|dTs\|dAs\|dGs\|5mCs\|dTs\|5mCs\|oTs\|oG] |
| 827 | [o5mCs\|oAs\|oTs\|L5mCs\|o5mCs\|oGs\|oGs\|oGs\|dTs\|dTs\|dTs\|5mCs\|dTs\|dAs\|dGs\|5mCs\|dTs\|5mCs\|oTs\|oG] |
| 828 | [o5mCs\|oAs\|oTs\|o5mCs\|L5mCs\|oGs\|oGs\|oGs\|dTs\|dTs\|dTs\|5mCs\|dTs\|dAs\|dGs\|5mCs\|dTs\|5mCs\|oTs\|oG] |
| 829 | [o5mCs\|oAs\|oTs\|o5mCs\|o5mCs\|LGs\|oGs\|oGs\|dTs\|dTs\|dTs\|5mCs\|dTs\|dAs\|dGs\|5mCs\|dTs\|5mCs\|oTs\|oG] |
| 830 | [o5mCs\|oAs\|oTs\|o5mCs\|o5mCs\|oGs\|LGs\|oGs\|dTs\|dTs\|dTs\|5mCs\|dTs\|dAs\|dGs\|5mCs\|dTs\|5mCs\|oTs\|oG] |
| 831 | [o5mCs\|oAs\|dTs\|5mCs\|5mCs\|dGs\|dGs\|dGs\|dTs\|dTs\|dTs\|5mCs\|oTs\|oAs\|oGs\|o5mCs\|oTs\|o5mCs\|LTs\|oG] |
| 832 | [o5mCs\|oAs\|dTs\|5mCs\|5mCs\|dGs\|dGs\|dGs\|dTs\|dTs\|dTs\|5mCs\|oTs\|oAs\|oGs\|o5mCs\|oTs\|L5mCs\|oTs\|oG] |
| 833 | [o5mCs\|oAs\|dTs\|5mCs\|5mCs\|dGs\|dGs\|dGs\|dTs\|dTs\|dTs\|5mCs\|oTs\|oAs\|oGs\|o5mCs\|LTs\|o5mCs\|oTs\|oG] |
| 834 | [o5mCs\|oAs\|dTs\|5mCs\|5mCs\|dGs\|dGs\|dGs\|dTs\|dTs\|dTs\|5mCs\|oTs\|oAs\|oGs\|L5mCs\|oTs\|o5mCs\|oTs\|oG] |
| 835 | [o5mCs\|oAs\|dTs\|5mCs\|5mCs\|dGs\|dGs\|dGs\|dTs\|dTs\|dTs\|5mCs\|oTs\|oAs\|LGs\|o5mCs\|oTs\|o5mCs\|oTs\|oG] |
| 836 | [o5mCs\|oAs\|dTs\|5mCs\|5mCs\|dGs\|dGs\|dGs\|dTs\|dTs\|dTs\|5mCs\|oTs\|LAs\|oGs\|o5mCs\|oTs\|o5mCs\|oTs\|oG] |
| 837 | [o5mCs\|LAs\|oTs\|o5mCs\|o5mCs\|oGs\|oGs\|dGs\|dTs\|dTs\|dTs\|5mCs\|dTs\|dAs\|dGs\|5mCs\|dTs\|o5mCs\|oTs\|oG] |
| 838 | [o5mCs\|oAs\|LTs\|o5mCs\|o5mCs\|oGs\|oGs\|dGs\|dTs\|dTs\|dTs\|5mCs\|dTs\|dAs\|dGs\|5mCs\|dTs\|o5mCs\|oTs\|oG] |
| 839 | [o5mCs\|oAs\|oTs\|L5mCs\|o5mCs\|oGs\|oGs\|dGs\|dTs\|dTs\|dTs\|5mCs\|dTs\|dAs\|dGs\|5mCs\|dTs\|o5mCs\|oTs\|oG] |
| 840 | [o5mCs\|oAs\|oTs\|o5mCs\|L5mCs\|oGs\|oGs\|dGs\|dTs\|dTs\|dTs\|5mCs\|dTs\|dAs\|dGs\|5mCs\|dTs\|o5mCs\|oTs\|oG] |
| 841 | [o5mCs\|oAs\|oTs\|o5mCs\|o5mCs\|LGs\|oGs\|dGs\|dTs\|dTs\|dTs\|5mCs\|dTs\|dAs\|dGs\|5mCs\|dTs\|o5mCs\|oTs\|oG] |
| 842 | [o5mCs\|oAs\|oTs\|5mCs\|5mCs\|dGs\|dGs\|dGs\|dTs\|dTs\|dTs\|5mCs\|dTs\|oAs\|oGs\|o5mCs\|oTs\|o5mCs\|LTs\|oG] |
| 843 | [o5mCs\|oAs\|oTs\|5mCs\|5mCs\|dGs\|dGs\|dGs\|dTs\|dTs\|dTs\|5mCs\|dTs\|oAs\|oGs\|o5mCs\|oTs\|L5mCs\|oTs\|oG] |
| 844 | [o5mCs\|oAs\|oTs\|5mCs\|5mCs\|dGs\|dGs\|dGs\|dTs\|dTs\|dTs\|5mCs\|dTs\|oAs\|oGs\|o5mCs\|LTs\|o5mCs\|oTs\|oG] |
| 845 | [o5mCs\|oAs\|oTs\|5mCs\|5mCs\|dGs\|dGs\|dGs\|dTs\|dTs\|dTs\|5mCs\|dTs\|oAs\|oGs\|L5mCs\|oTs\|o5mCs\|oTs\|oG] |
| 846 | [o5mCs\|oAs\|oTs\|5mCs\|5mCs\|dGs\|dGs\|dGs\|dTs\|dTs\|dTs\|5mCs\|dTs\|oAs\|LGs\|o5mCs\|oTs\|o5mCs\|oTs\|oG] |
| 847 | [o5mCs\|LAs\|oTs\|o5mCs\|o5mCs\|oGs\|oGs\|dGs\|dTs\|dTs\|dTs\|5mCs\|dTs\|dAs\|dGs\|5mCs\|dTs\|o5mCs\|oT] |
| 848 | [o5mCs\|oAs\|LTs\|o5mCs\|o5mCs\|oGs\|oGs\|dGs\|dTs\|dTs\|dTs\|5mCs\|dTs\|dAs\|dGs\|5mCs\|dTs\|o5mCs\|oT] |
| 849 | [o5mCs\|oAs\|oTs\|L5mCs\|o5mCs\|oGs\|oGs\|dGs\|dTs\|dTs\|dTs\|5mCs\|dTs\|dAs\|dGs\|5mCs\|dTs\|o5mCs\|oT] |
| 850 | [o5mCs\|oAs\|oTs\|o5mCs\|L5mCs\|oGs\|oGs\|dGs\|dTs\|dTs\|dTs\|5mCs\|dTs\|dAs\|dGs\|5mCs\|dTs\|o5mCs\|oT] |
| 851 | [o5mCs\|oAs\|oTs\|o5mCs\|o5mCs\|LGs\|oGs\|dGs\|dTs\|dTs\|dTs\|5mCs\|dTs\|dAs\|dGs\|5mCs\|dTs\|o5mCs\|oT] |
| 852 | [oAs\|oTs\|5mCs\|5mCs\|dGs\|dGs\|dGs\|dTs\|dTs\|dTs\|5mCs\|dTs\|oAs\|oGs\|o5mCs\|oTs\|o5mCs\|LTs\|oG] |
| 853 | [oAs\|oTs\|5mCs\|5mCs\|dGs\|dGs\|dGs\|dTs\|dTs\|dTs\|5mCs\|dTs\|oAs\|oGs\|o5mCs\|oTs\|L5mCs\|oTs\|oG] |
| 854 | [oAs\|oTs\|5mCs\|5mCs\|dGs\|dGs\|dGs\|dTs\|dTs\|dTs\|5mCs\|dTs\|oAs\|oGs\|o5mCs\|LTs\|o5mCs\|oTs\|oG] |
| 855 | [oAs\|oTs\|5mCs\|5mCs\|dGs\|dGs\|dGs\|dTs\|dTs\|dTs\|5mCs\|dTs\|oAs\|oGs\|L5mCs\|oTs\|o5mCs\|oTs\|oG] |
| 856 | [oAs\|oTs\|5mCs\|5mCs\|dGs\|dGs\|dGs\|dTs\|dTs\|dTs\|5mCs\|dTs\|oAs\|LGs\|o5mCs\|oTs\|o5mCs\|oTs\|oG] |
| 857 | [o5mCs\|LAs\|oTs\|o5mCs\|o5mCs\|oGs\|dGs\|dGs\|dTs\|dTs\|dTs\|5mCs\|dTs\|dAs\|dGs\|5mCs\|oTs\|o5mCs\|oTs\|oG] |
| 858 | [o5mCs\|oAs\|LTs\|o5mCs\|o5mCs\|oGs\|dGs\|dGs\|dTs\|dTs\|dTs\|5mCs\|dTs\|dAs\|dGs\|5mCs\|oTs\|o5mCs\|oTs\|oG] |
| 859 | [o5mCs\|oAs\|oTs\|L5mCs\|o5mCs\|oGs\|dGs\|dGs\|dTs\|dTs\|dTs\|5mCs\|dTs\|dAs\|dGs\|5mCs\|oTs\|o5mCs\|oTs\|oG] |
| 860 | [o5mCs\|oAs\|oTs\|o5mCs\|L5mCs\|oGs\|dGs\|dGs\|dTs\|dTs\|dTs\|5mCs\|dTs\|dAs\|dGs\|5mCs\|oTs\|o5mCs\|oTs\|oG] |
| 861 | [o5mCs\|oAs\|oTs\|o5mCs\|5mCs\|dGs\|dGs\|dGs\|dTs\|dTs\|dTs\|5mCs\|dTs\|dAs\|oGs\|o5mCs\|oTs\|o5mCs\|LTs\|oG] |
| 862 | [o5mCs\|oAs\|oTs\|o5mCs\|5mCs\|dGs\|dGs\|dGs\|dTs\|dTs\|dTs\|5mCs\|dTs\|dAs\|oGs\|o5mCs\|oTs\|L5mCs\|oTs\|oG] |
| 863 | [o5mCs\|oAs\|oTs\|o5mCs\|5mCs\|dGs\|dGs\|dGs\|dTs\|dTs\|dTs\|5mCs\|dTs\|dAs\|oGs\|o5mCs\|LTs\|o5mCs\|oTs\|oG] |
| 864 | [o5mCs\|oAs\|oTs\|o5mCs\|5mCs\|dGs\|dGs\|dGs\|dTs\|dTs\|dTs\|5mCs\|dTs\|dAs\|oGs\|L5mCs\|oTs\|o5mCs\|oTs\|oG] |
| 865 | [o5mCs\|LAs\|oTs\|o5mCs\|o5mCs\|oGs\|dGs\|dGs\|dTs\|dTs\|dTs\|5mCs\|dTs\|dAs\|dGs\|5mCs\|oTs\|o5mCs\|oT] |
| 866 | [o5mCs\|oAs\|LTs\|o5mCs\|o5mCs\|oGs\|dGs\|dGs\|dTs\|dTs\|dTs\|5mCs\|dTs\|dAs\|dGs\|5mCs\|oTs\|o5mCs\|oT] |
| 867 | [o5mCs\|oAs\|oTs\|L5mCs\|o5mCs\|oGs\|dGs\|dGs\|dTs\|dTs\|dTs\|5mCs\|dTs\|dAs\|dGs\|5mCs\|oTs\|o5mCs\|oT] |
| 868 | [o5mCs\|oAs\|oTs\|o5mCs\|L5mCs\|oGs\|dGs\|dGs\|dTs\|dTs\|dTs\|5mCs\|dTs\|dAs\|dGs\|5mCs\|oTs\|o5mCs\|oT] |
| 869 | [o5mCs\|oAs\|oTs\|5mCs\|5mCs\|dGs\|dGs\|dGs\|dTs\|dTs\|dTs\|5mCs\|dTs\|dAs\|oGs\|o5mCs\|oTs\|o5mCs\|LTs\|oG] |
| 870 | [o5mCs\|oAs\|oTs\|5mCs\|5mCs\|dGs\|dGs\|dGs\|dTs\|dTs\|dTs\|5mCs\|dTs\|dAs\|oGs\|o5mCs\|oTs\|L5mCs\|oTs\|oG] |
| 871 | [o5mCs\|oAs\|oTs\|5mCs\|5mCs\|dGs\|dGs\|dGs\|dTs\|dTs\|dTs\|5mCs\|dTs\|dAs\|oGs\|o5mCs\|LTs\|o5mCs\|oTs\|oG] |
| 872 | [o5mCs\|LAs\|oTs\|o5mCs\|o5mCs\|oGs\|dGs\|dGs\|dTs\|dTs\|dTs\|5mCs\|dTs\|dAs\|dGs\|5mCs\|oTs\|o5mC] |
| 873 | [o5mCs\|oAs\|LTs\|o5mCs\|o5mCs\|oGs\|dGs\|dGs\|dTs\|dTs\|dTs\|5mCs\|dTs\|dAs\|dGs\|5mCs\|oTs\|o5mC] |
| 874 | [o5mCs\|oAs\|oTs\|L5mCs\|o5mCs\|oGs\|dGs\|dGs\|dTs\|dTs\|dTs\|5mCs\|dTs\|dAs\|dGs\|5mCs\|oTs\|o5mC] |
| 875 | [o5mCs\|oAs\|oTs\|o5mCs\|L5mCs\|oGs\|dGs\|dGs\|dTs\|dTs\|dTs\|5mCs\|dTs\|dAs\|dGs\|5mCs\|oTs\|o5mC] |
| 876 | [oTs\|o5mCs\|5mCs\|dGs\|dGs\|dGs\|dTs\|dTs\|dTs\|5mCs\|dTs\|dAs\|oGs\|o5mCs\|oTs\|o5mCs\|LTs\|oG] |
| 877 | [oTs\|o5mCs\|5mCs\|dGs\|dGs\|dGs\|dTs\|dTs\|dTs\|5mCs\|dTs\|dAs\|oGs\|o5mCs\|oTs\|L5mCs\|oTs\|oG] |
| 878 | [oTs\|o5mCs\|5mCs\|dGs\|dGs\|dGs\|dTs\|dTs\|dTs\|5mCs\|dTs\|dAs\|oGs\|o5mCs\|LTs\|o5mCs\|oTs\|oG] |
| 879 | [oTs\|o5mCs\|5mCs\|dGs\|dGs\|dGs\|dTs\|dTs\|dTs\|5mCs\|dTs\|dAs\|oGs\|L5mCs\|oTs\|o5mCs\|oTs\|oG] |
| 880 | [o5mCs\|LAs\|oTs\|o5mCs\|o5mCs\|dGs\|dGs\|dGs\|dTs\|dTs\|dTs\|5mCs\|dTs\|dAs\|dGs\|o5mCs\|oTs\|o5mCs\|oTs\|oG] |
| 881 | [o5mCs\|oAs\|LTs\|o5mCs\|o5mCs\|dGs\|dGs\|dGs\|dTs\|dTs\|dTs\|5mCs\|dTs\|dAs\|dGs\|o5mCs\|oTs\|o5mCs\|oTs\|oG] |
| 882 | [o5mCs\|oAs\|oTs\|L5mCs\|o5mCs\|dGs\|dGs\|dGs\|dTs\|dTs\|dTs\|5mCs\|dTs\|dAs\|dGs\|o5mCs\|oTs\|o5mCs\|oTs\|oG] |
| 883 | [o5mCs\|oAs\|oTs\|o5mCs\|o5mCs\|dGs\|dGs\|dGs\|dTs\|dTs\|dTs\|5mCs\|dTs\|dAs\|dGs\|o5mCs\|oTs\|o5mCs\|LTs\|oG] |
| 884 | [o5mCs\|oAs\|oTs\|o5mCs\|o5mCs\|dGs\|dGs\|dGs\|dTs\|dTs\|dTs\|5mCs\|dTs\|dAs\|dGs\|o5mCs\|oTs\|L5mCs\|oTs\|oG] |
| 885 | [o5mCs\|oAs\|oTs\|o5mCs\|o5mCs\|dGs\|dGs\|dGs\|dTs\|dTs\|dTs\|5mCs\|dTs\|dAs\|dGs\|o5mCs\|LTs\|o5mCs\|oTs\|oG] |
| 886 | [o5mCs\|LAs\|oTs\|o5mCs\|o5mCs\|dGs\|dGs\|dGs\|dTs\|dTs\|dTs\|5mCs\|dTs\|dAs\|dGs\|o5mCs\|oTs\|o5mCs\|oT] |
| 887 | [o5mCs\|oAs\|LTs\|o5mCs\|o5mCs\|dGs\|dGs\|dGs\|dTs\|dTs\|dTs\|5mCs\|dTs\|dAs\|dGs\|o5mCs\|oTs\|o5mCs\|oT] |
| 888 | [o5mCs\|oAs\|oTs\|L5mCs\|o5mCs\|dGs\|dGs\|dGs\|dTs\|dTs\|dTs\|5mCs\|dTs\|dAs\|dGs\|o5mCs\|oTs\|o5mCs\|oT] |
| 889 | [oAs\|oTs\|o5mCs\|o5mCs\|dGs\|dGs\|dGs\|dTs\|dTs\|dTs\|5mCs\|dTs\|dAs\|dGs\|o5mCs\|oTs\|o5mCs\|LTs\|oG] |
| 890 | [oAs\|oTs\|o5mCs\|o5mCs\|dGs\|dGs\|dGs\|dTs\|dTs\|dTs\|5mCs\|dTs\|dAs\|dGs\|o5mCs\|oTs\|L5mCs\|oTs\|oG] |
| 891 | [oAs\|oTs\|o5mCs\|o5mCs\|dGs\|dGs\|dGs\|dTs\|dTs\|dTs\|5mCs\|dTs\|dAs\|dGs\|o5mCs\|LTs\|o5mCs\|oTs\|oG] |
| 892 | [o5mCs\|LAs\|oTs\|o5mCs\|o5mCs\|dGs\|dGs\|dGs\|dTs\|dTs\|dTs\|5mCs\|dTs\|dAs\|dGs\|o5mCs\|oTs\|o5mC] |
| 893 | [o5mCs\|oAs\|LTs\|o5mCs\|o5mCs\|dGs\|dGs\|dGs\|dTs\|dTs\|dTs\|5mCs\|dTs\|dAs\|dGs\|o5mCs\|oTs\|o5mC] |
| 894 | [o5mCs\|oAs\|oTs\|L5mCs\|o5mCs\|dGs\|dGs\|dGs\|dTs\|dTs\|dTs\|5mCs\|dTs\|dAs\|dGs\|o5mCs\|oTs\|o5mC] |
| 895 | [oTs\|o5mCs\|o5mCs\|dGs\|dGs\|dGs\|dTs\|dTs\|dTs\|5mCs\|dTs\|dAs\|dGs\|o5mCs\|oTs\|o5mCs\|LTs\|oG] |
| 896 | [oTs\|o5mCs\|o5mCs\|dGs\|dGs\|dGs\|dTs\|dTs\|dTs\|5mCs\|dTs\|dAs\|dGs\|o5mCs\|oTs\|L5mCs\|oTs\|oG] |
| 897 | [oTs\|o5mCs\|o5mCs\|dGs\|dGs\|dGs\|dTs\|dTs\|dTs\|5mCs\|dTs\|dAs\|dGs\|o5mCs\|LTs\|o5mCs\|oTs\|oG] |
| 898 | [o5mCs\|LAs\|oTs\|o5mCs\|o5mCs\|dGs\|dGs\|dGs\|dTs\|dTs\|dTs\|5mCs\|dTs\|dAs\|dGs\|o5mCs\|oT] |
| 899 | [o5mCs\|oAs\|LTs\|o5mCs\|o5mCs\|dGs\|dGs\|dGs\|dTs\|dTs\|dTs\|5mCs\|dTs\|dAs\|dGs\|o5mCs\|oT] |
| 900 | [o5mCs\|oAs\|oTs\|L5mCs\|o5mCs\|dGs\|dGs\|dGs\|dTs\|dTs\|dTs\|5mCs\|dTs\|dAs\|dGs\|o5mCs\|oT] |
| 901 | [o5mCs\|o5mCs\|dGs\|dGs\|dGs\|dTs\|dTs\|dTs\|5mCs\|dTs\|dAs\|dGs\|o5mCs\|oTs\|o5mCs\|LTs\|oG] |
| 902 | [o5mCs\|o5mCs\|dGs\|dGs\|dGs\|dTs\|dTs\|dTs\|5mCs\|dTs\|dAs\|dGs\|o5mCs\|oTs\|L5mCs\|oTs\|oG] |
| 903 | [o5mCs\|o5mCs\|dGs\|dGs\|dGs\|dTs\|dTs\|dTs\|5mCs\|dTs\|dAs\|dGs\|o5mCs\|LTs\|o5mCs\|oTs\|oG] |
| 904 | [oAs\|LTs\|o5mCs\|o5mCs\|dGs\|dGs\|dGs\|dTs\|dTs\|dTs\|5mCs\|dTs\|dAs\|dGs\|o5mCs\|oTs\|o5mCs\|oTs\|oG] |
| 905 | [oAs\|oTs\|L5mCs\|o5mCs\|dGs\|dGs\|dGs\|dTs\|dTs\|dTs\|5mCs\|dTs\|dAs\|dGs\|o5mCs\|oTs\|o5mCs\|oTs\|oG] |
| 906 | [o5mCs\|oAs\|oTs\|o5mCs\|o5mCs\|dGs\|dGs\|dGs\|dTs\|dTs\|dTs\|5mCs\|dTs\|dAs\|dGs\|o5mCs\|oTs\|L5mCs\|oT] |
| 907 | [o5mCs\|oAs\|oTs\|o5mCs\|o5mCs\|dGs\|dGs\|dGs\|dTs\|dTs\|dTs\|5mCs\|dTs\|dAs\|dGs\|o5mCs\|LTs\|o5mCs\|oT] |
| 908 | [oAs\|LTs\|o5mCs\|o5mCs\|dGs\|dGs\|dGs\|dTs\|dTs\|dTs\|5mCs\|dTs\|dAs\|dGs\|o5mCs\|oTs\|o5mCs\|oT] |
| 909 | [oAs\|oTs\|L5mCs\|o5mCs\|dGs\|dGs\|dGs\|dTs\|dTs\|dTs\|5mCs\|dTs\|dAs\|dGs\|o5mCs\|oTs\|o5mCs\|oT] |
| 910 | [oAs\|oTs\|o5mCs\|o5mCs\|dGs\|dGs\|dGs\|dTs\|dTs\|dTs\|5mCs\|dTs\|dAs\|dGs\|o5mCs\|oTs\|L5mCs\|oT] |
| 911 | [oAs\|oTs\|o5mCs\|o5mCs\|dGs\|dGs\|dGs\|dTs\|dTs\|dTs\|5mCs\|dTs\|dAs\|dGs\|o5mCs\|LTs\|o5mCs\|oT] |
| 912 | [oAs\|LTs\|o5mCs\|o5mCs\|dGs\|dGs\|dGs\|dTs\|dTs\|dTs\|5mCs\|dTs\|dAs\|dGs\|o5mCs\|oTs\|o5mC] |
| 913 | [oAs\|oTs\|L5mCs\|o5mCs\|dGs\|dGs\|dGs\|dTs\|dTs\|dTs\|5mCs\|dTs\|dAs\|dGs\|o5mCs\|oTs\|o5mC] |
| 914 | [oAs\|oTs\|o5mCs\|o5mCs\|dGs\|dGs\|dGs\|dTs\|dTs\|dTs\|5mCs\|dTs\|dAs\|dGs\|o5mCs\|LTs\|o5mC] |
| 915 | [o5mCs\|oAs\|oTs\|o5mCs\|o5mCs\|oGs\|oGs\|oGs\|dTs\|dTs\|dTs\|5mCs\|dTs\|dAs\|dGs\|5mCs\|dTs\|5mCs\|oTs\|oG] |
| 916 | [o5mCs\|oAs\|dTs\|5mCs\|5mCs\|dGs\|dGs\|dGs\|dTs\|dTs\|dTs\|5mCs\|oTs\|oAs\|oGs\|o5mCs\|oTs\|o5mCs\|oTs\|oG] |
| 917 | [o5mCs\|oAs\|oTs\|o5mCs\|o5mCs\|oGs\|oGs\|dGs\|dTs\|dTs\|dTs\|5mCs\|dTs\|dAs\|dGs\|5mCs\|dTs\|o5mCs\|oTs\|oG] |
| 918 | [o5mCs\|oAs\|oTs\|5mCs\|5mCs\|dGs\|dGs\|dGs\|dTs\|dTs\|dTs\|5mCs\|dTs\|oAs\|oGs\|o5mCs\|oTs\|o5mCs\|oTs\|oG] |
| 919 | [o5mCs\|oAs\|oTs\|o5mCs\|o5mCs\|oGs\|oGs\|dGs\|dTs\|dTs\|dTs\|5mCs\|dTs\|dAs\|dGs\|5mCs\|dTs\|o5mCs\|oT] |
| 920 | [oAs\|oTs\|5mCs\|5mCs\|dGs\|dGs\|dGs\|dTs\|dTs\|dTs\|5mCs\|dTs\|oAs\|oGs\|o5mCs\|oTs\|o5mCs\|oTs\|oG] |
| 921 | [o5mCs\|oAs\|oTs\|o5mCs\|o5mCs\|oGs\|dGs\|dGs\|dTs\|dTs\|dTs\|5mCs\|dTs\|dAs\|dGs\|5mCs\|oTs\|o5mCs\|oTs\|oG] |
| 922 | [o5mCs\|oAs\|oTs\|o5mCs\|5mCs\|dGs\|dGs\|dGs\|dTs\|dTs\|dTs\|5mCs\|dTs\|dAs\|oGs\|o5mCs\|oTs\|o5mCs\|oTs\|oG] |
| 923 | [o5mCs\|oAs\|oTs\|o5mCs\|o5mCs\|oGs\|dGs\|dGs\|dTs\|dTs\|dTs\|5mCs\|dTs\|dAs\|dGs\|5mCs\|oTs\|o5mCs\|oT] |
| 924 | [o5mCs\|oAs\|oTs\|5mCs\|5mCs\|dGs\|dGs\|dGs\|dTs\|dTs\|dTs\|5mCs\|dTs\|dAs\|oGs\|o5mCs\|oTs\|o5mCs\|oTs\|oG] |
| 925 | [o5mCs\|oAs\|oTs\|o5mCs\|o5mCs\|oGs\|dGs\|dGs\|dTs\|dTs\|dTs\|5mCs\|dTs\|dAs\|dGs\|5mCs\|oTs\|o5mC] |
| 926 | [oTs\|o5mCs\|5mCs\|dGs\|dGs\|dGs\|dTs\|dTs\|dTs\|5mCs\|dTs\|dAs\|oGs\|o5mCs\|oTs\|o5mCs\|oTs\|oG] |
| 927 | [o5mCs\|oAs\|oTs\|o5mCs\|o5mCs\|dGs\|dGs\|dGs\|dTs\|dTs\|dTs\|5mCs\|dTs\|dAs\|dGs\|o5mCs\|oTs\|o5mCs\|oTs\|oG] |
| 928 | [o5mCs\|oAs\|oTs\|o5mCs\|o5mCs\|dGs\|dGs\|dGs\|dTs\|dTs\|dTs\|5mCs\|dTs\|dAs\|dGs\|o5mCs\|oTs\|o5mCs\|oT] |
| 929 | [o5mCs\|oAs\|oTs\|o5mCs\|o5mCs\|dGs\|dGs\|dGs\|dTs\|dTs\|dTs\|5mCs\|dTs\|dAs\|dGs\|o5mCs\|oTs\|o5mC] |
| 930 | [oTs\|o5mCs\|o5mCs\|dGs\|dGs\|dGs\|dTs\|dTs\|dTs\|5mCs\|dTs\|dAs\|dGs\|o5mCs\|oTs\|o5mCs\|oTs\|oG] |
| 931 | [o5mCs\|oAs\|oTs\|o5mCs\|o5mCs\|dGs\|dGs\|dGs\|dTs\|dTs\|dTs\|5mCs\|dTs\|dAs\|dGs\|o5mCs\|oT] |
| 932 | [o5mCs\|o5mCs\|dGs\|dGs\|dGs\|dTs\|dTs\|dTs\|5mCs\|dTs\|dAs\|dGs\|o5mCs\|oTs\|o5mCs\|oTs\|oG] |
| 933 | [oAs\|oTs\|o5mCs\|o5mCs\|dGs\|dGs\|dGs\|dTs\|dTs\|dTs\|5mCs\|dTs\|dAs\|dGs\|o5mCs\|oTs\|o5mCs\|oTs\|oG] |
| 934 | [oAs\|oTs\|o5mCs\|o5mCs\|dGs\|dGs\|dGs\|dTs\|dTs\|dTs\|5mCs\|dTs\|dAs\|dGs\|o5mCs\|oTs\|o5mCs\|oT] |
| 935 | [oAs\|oTs\|o5mCs\|o5mCs\|dGs\|dGs\|dGs\|dTs\|dTs\|dTs\|5mCs\|dTs\|dAs\|dGs\|o5mCs\|oTs\|o5mC] |
| 936 | [o5mCs\|oAs\|oTp\|o5mCs\|o5mCs\|dGs\|dGs\|dGs\|dTs\|dTs\|dTs\|5mCs\|dTs\|dAs\|dGs\|o5mCs\|oTs\|o5mCs\|oTs\|oG] |
| 937 | [o5mCs\|oAs\|oTs\|o5mCp\|o5mCs\|dGs\|dGs\|dGs\|dTs\|dTs\|dTs\|5mCs\|dTs\|dAs\|dGs\|o5mCs\|oTs\|o5mCs\|oTs\|oG] |
| 938 | [o5mCs\|oAs\|oTp\|o5mCp\|o5mCs\|dGs\|dGs\|dGs\|dTs\|dTs\|dTs\|5mCs\|dTs\|dAs\|dGs\|o5mCs\|oTs\|o5mCs\|oTs\|oG] |
| 939 | [o5mCs\|oAs\|oTs\|o5mCs\|o5mCs\|dGs\|dGs\|dGs\|dTs\|dTs\|dTs\|5mCs\|dTs\|dAs\|dGs\|o5mCs\|oTp\|o5mCs\|oTs\|oG] |
| 940 | [o5mCs\|oAs\|oTs\|o5mCs\|o5mCs\|dGs\|dGs\|dGs\|dTs\|dTs\|dTs\|5mCs\|dTs\|dAs\|dGs\|o5mCp\|oTs\|o5mCs\|oTs\|oG] |
| 941 | [o5mCs\|oAs\|oTs\|o5mCs\|o5mCs\|dGs\|dGs\|dGs\|dTs\|dTs\|dTs\|5mCs\|dTs\|dAs\|dGs\|o5mCp\|oTp\|o5mCs\|oTs\|oG] |
| 942 | [o5mCs\|oAs\|oTp\|o5mCs\|o5mCs\|dGs\|dGs\|dGs\|dTs\|dTs\|dTs\|5mCs\|dTs\|dAs\|dGs\|o5mCs\|oTp\|o5mCs\|oTs\|oG] |
| 943 | [o5mCs\|oAs\|oTp\|o5mCs\|o5mCs\|dGs\|dGs\|dGs\|dTs\|dTs\|dTs\|5mCs\|dTs\|dAs\|dGs\|o5mCp\|oTs\|o5mCs\|oTs\|oG] |
| 944 | [o5mCs\|oAs\|oTs\|o5mCp\|o5mCs\|dGs\|dGs\|dGs\|dTs\|dTs\|dTs\|5mCs\|dTs\|dAs\|dGs\|o5mCs\|oTp\|o5mCs\|oTs\|oG] |
| 945 | [o5mCs\|oAs\|oTs\|o5mCp\|o5mCs\|dGs\|dGs\|dGs\|dTs\|dTs\|dTs\|5mCs\|dTs\|dAs\|dGs\|o5mCp\|oTs\|o5mCs\|oTs\|oG] |
| 946 | [o5mCs\|oAs\|oTp\|o5mCs\|o5mCs\|dGs\|dGs\|dGs\|dTs\|dTs\|dTs\|5mCs\|dTs\|dAs\|dGs\|o5mCp\|oTp\|o5mCs\|oTs\|oG] |
| 947 | [o5mCs\|oAs\|oTs\|o5mCp\|o5mCs\|dGs\|dGs\|dGs\|dTs\|dTs\|dTs\|5mCs\|dTs\|dAs\|dGs\|o5mCp\|oTp\|o5mCs\|oTs\|oG] |
| 948 | [o5mCs\|oAs\|oTp\|o5mCp\|o5mCs\|dGs\|dGs\|dGs\|dTs\|dTs\|dTs\|5mCs\|dTs\|dAs\|dGs\|o5mCs\|oTp\|o5mCs\|oTs\|oG] |
| 949 | [o5mCs\|oAs\|oTp\|o5mCp\|o5mCs\|dGs\|dGs\|dGs\|dTs\|dTs\|dTs\|5mCs\|dTs\|dAs\|dGs\|o5mCp\|oTs\|o5mCs\|oTs\|oG] |
| 950 | [o5mCs\|oAs\|oTp\|o5mCp\|o5mCs\|dGs\|dGs\|dGs\|dTs\|dTs\|dTs\|5mCs\|dTs\|dAs\|dGs\|o5mCp\|oTp\|o5mCs\|oTs\|oG] |
| 951 | [o5mCs\|oAs\|oTs\|o5mCs\|o5mCs\|dGs\|dGs\|dGs\|dTs\|dTs\|dTs\|5mCs\|dTs\|dAs\|dGs\|o5mCs\|oTs\|o5mCs\|oTs\|oGs\|oA] |
| 952 | [o5mCs\|oAs\|oTp\|o5mCs\|o5mCs\|dGs\|dGs\|dGs\|dTs\|dTs\|dTs\|5mCs\|dTs\|dAs\|dGs\|o5mCs\|oTs\|o5mCs\|oTs\|oGs\|oA] |
| 953 | [o5mCs\|oAs\|oTs\|o5mCp\|o5mCs\|dGs\|dGs\|dGs\|dTs\|dTs\|dTs\|5mCs\|dTs\|dAs\|dGs\|o5mCs\|oTs\|o5mCs\|oTs\|oGs\|oA] |
| 954 | [o5mCs\|oAs\|oTp\|o5mCp\|o5mCs\|dGs\|dGs\|dGs\|dTs\|dTs\|dTs\|5mCs\|dTs\|dAs\|dGs\|o5mCs\|oTs\|o5mCs\|oTs\|oGs\|oA] |
| 955 | [o5mCs\|oAs\|oTs\|o5mCs\|o5mCs\|dGs\|dGs\|dGs\|dTs\|dTs\|dTs\|5mCs\|dTs\|dAs\|dGs\|o5mCs\|oTp\|o5mCs\|oTs\|oGs\|oA] |
| 956 | [o5mCs\|oAs\|oTs\|o5mCs\|o5mCs\|dGs\|dGs\|dGs\|dTs\|dTs\|dTs\|5mCs\|dTs\|dAs\|dGs\|o5mCp\|oTs\|o5mCs\|oTs\|oGs\|oA] |
| 957 | [o5mCs\|oAs\|oTs\|o5mCs\|o5mCs\|dGs\|dGs\|dGs\|dTs\|dTs\|dTs\|5mCs\|dTs\|dAs\|dGs\|o5mCp\|oTp\|o5mCs\|oTs\|oGs\|oA] |
| 958 | [o5mCs\|oAs\|oTp\|o5mCs\|o5mCs\|dGs\|dGs\|dGs\|dTs\|dTs\|dTs\|5mCs\|dTs\|dAs\|dGs\|o5mCs\|oTp\|o5mCs\|oTs\|oGs\|oA] |
| 959 | [o5mCs\|oAs\|oTp\|o5mCs\|o5mCs\|dGs\|dGs\|dGs\|dTs\|dTs\|dTs\|5mCs\|dTs\|dAs\|dGs\|o5mCp\|oTs\|o5mCs\|oTs\|oGs\|oA] |
| 960 | [o5mCs\|oAs\|oTs\|o5mCp\|o5mCs\|dGs\|dGs\|dGs\|dTs\|dTs\|dTs\|5mCs\|dTs\|dAs\|dGs\|o5mCs\|oTp\|o5mCs\|oTs\|oGs\|oA] |
| 961 | [o5mCs\|oAs\|oTs\|o5mCp\|o5mCs\|dGs\|dGs\|dGs\|dTs\|dTs\|dTs\|5mCs\|dTs\|dAs\|dGs\|o5mCp\|oTs\|o5mCs\|oTs\|oGs\|oA] |
| 962 | [o5mCs\|oAs\|oTp\|o5mCs\|o5mCs\|dGs\|dGs\|dGs\|dTs\|dTs\|dTs\|5mCs\|dTs\|dAs\|dGs\|o5mCp\|oTp\|o5mCs\|oTs\|oGs\|oA] |
| 963 | [o5mCs\|oAs\|oTs\|o5mCp\|o5mCs\|dGs\|dGs\|dGs\|dTs\|dTs\|dTs\|5mCs\|dTs\|dAs\|dGs\|o5mCp\|oTp\|o5mCs\|oTs\|oGs\|oA] |
| 964 | [o5mCs\|oAs\|oTp\|o5mCp\|o5mCs\|dGs\|dGs\|dGs\|dTs\|dTs\|dTs\|5mCs\|dTs\|dAs\|dGs\|o5mCs\|oTp\|o5mCs\|oTs\|oGs\|oA] |
| 965 | [o5mCs\|oAs\|oTp\|o5mCp\|o5mCs\|dGs\|dGs\|dGs\|dTs\|dTs\|dTs\|5mCs\|dTs\|dAs\|dGs\|o5mCp\|oTs\|o5mCs\|oTs\|oGs\|oA] |
| 966 | [o5mCs\|oAs\|oTp\|o5mCp\|o5mCs\|dGs\|dGs\|dGs\|dTs\|dTs\|dTs\|5mCs\|dTs\|dAs\|dGs\|o5mCp\|oTp\|o5mCs\|oTs\|oGs\|oA] |
| 967 | [o5mCs\|oAs\|oTs\|o5mCs\|o5mCs\|dGs\|dGs\|dGs\|dTs\|dTs\|dTs\|5mCs\|dTs\|dAs\|dGs\|o5mCs\|oTs\|o5mCs\|oTs\|oGs\|oAs\|oA] |
| 968 | [o5mCs\|oAs\|oTp\|o5mCs\|o5mCs\|dGs\|dGs\|dGs\|dTs\|dTs\|dTs\|5mCs\|dTs\|dAs\|dGs\|o5mCs\|oTs\|o5mCs\|oTs\|oGs\|oAs\|oA] |
| 969 | [o5mCs\|oAs\|oTs\|o5mCp\|o5mCs\|dGs\|dGs\|dGs\|dTs\|dTs\|dTs\|5mCs\|dTs\|dAs\|dGs\|o5mCs\|oTs\|o5mCs\|oTs\|oGs\|oAs\|oA] |
| 970 | [o5mCs\|oAs\|oTp\|o5mCp\|o5mCs\|dGs\|dGs\|dGs\|dTs\|dTs\|dTs\|5mCs\|dTs\|dAs\|dGs\|o5mCs\|oTs\|o5mCs\|oTs\|oGs\|oAs\|oA] |
| 971 | [o5mCs\|oAs\|oTs\|o5mCs\|o5mCs\|dGs\|dGs\|dGs\|dTs\|dTs\|dTs\|5mCs\|dTs\|dAs\|dGs\|o5mCs\|oTp\|o5mCs\|oTs\|oGs\|oAs\|oA] |
| 972 | [o5mCs\|oAs\|oTs\|o5mCs\|o5mCs\|dGs\|dGs\|dGs\|dTs\|dTs\|dTs\|5mCs\|dTs\|dAs\|dGs\|o5mCp\|oTs\|o5mCs\|oTs\|oGs\|oAs\|oA] |
| 973 | [o5mCs\|oAs\|oTs\|o5mCs\|o5mCs\|dGs\|dGs\|dGs\|dTs\|dTs\|dTs\|5mCs\|dTs\|dAs\|dGs\|o5mCp\|oTp\|o5mCs\|oTs\|oGs\|oAs\|oA] |
| 974 | [o5mCs\|oAs\|oTp\|o5mCs\|o5mCs\|dGs\|dGs\|dGs\|dTs\|dTs\|dTs\|5mCs\|dTs\|dAs\|dGs\|o5mCs\|oTp\|o5mCs\|oTs\|oGs\|oAs\|oA] |
| 975 | [o5mCs\|oAs\|oTp\|o5mCs\|o5mCs\|dGs\|dGs\|dGs\|dTs\|dTs\|dTs\|5mCs\|dTs\|dAs\|dGs\|o5mCp\|oTs\|o5mCs\|oTs\|oGs\|oAs\|oA] |
| 976 | [o5mCs\|oAs\|oTs\|o5mCp\|o5mCs\|dGs\|dGs\|dGs\|dTs\|dTs\|dTs\|5mCs\|dTs\|dAs\|dGs\|o5mCs\|oTp\|o5mCs\|oTs\|oGs\|oAs\|oA] |
| 977 | [o5mCs\|oAs\|oTs\|o5mCp\|o5mCs\|dGs\|dGs\|dGs\|dTs\|dTs\|dTs\|5mCs\|dTs\|dAs\|dGs\|o5mCp\|oTs\|o5mCs\|oTs\|oGs\|oAs\|oA] |
| 978 | [o5mCs\|oAs\|oTp\|o5mCs\|o5mCs\|dGs\|dGs\|dGs\|dTs\|dTs\|dTs\|5mCs\|dTs\|dAs\|dGs\|o5mCp\|oTp\|o5mCs\|oTs\|oGs\|oAs\|oA] |
| 979 | [o5mCs\|oAs\|oTs\|o5mCp\|o5mCs\|dGs\|dGs\|dGs\|dTs\|dTs\|dTs\|5mCs\|dTs\|dAs\|dGs\|o5mCp\|oTp\|o5mCs\|oTs\|oGs\|oAs\|oA] |
| 980 | [o5mCs\|oAs\|oTp\|o5mCp\|o5mCs\|dGs\|dGs\|dGs\|dTs\|dTs\|dTs\|5mCs\|dTs\|dAs\|dGs\|o5mCs\|oTp\|o5mCs\|oTs\|oGs\|oAs\|oA] |
| 981 | [o5mCs\|oAs\|oTp\|o5mCp\|o5mCs\|dGs\|dGs\|dGs\|dTs\|dTs\|dTs\|5mCs\|dTs\|dAs\|dGs\|o5mCp\|oTs\|o5mCs\|oTs\|oGs\|oAs\|oA] |
| 982 | [o5mCs\|oAs\|oTp\|o5mCp\|o5mCs\|dGs\|dGs\|dGs\|dTs\|dTs\|dTs\|5mCs\|dTs\|dAs\|dGs\|o5mCp\|oTp\|o5mCs\|oTs\|oGs\|oAs\|oAl |
| 983 | [o5mCs\|oAs\|oTs\|o5mCs\|o5mCs\|dGs\|dGs\|dGs\|dTs\|dTs\|dTs\|5mCs\|dTs\|dAs\|dGs\|o5mCs\|oTs\|o5mCs\|oTs\|oGs\|oAs\|oAs\|o5mC] |
| 984 | [o5mCs\|oAs\|oTp\|o5mCs\|o5mCs\|dGs\|dGs\|dGs\|dTs\|dTs\|dTs\|5mCs\|dTs\|dAs\|dGs\|o5mCs\|oTs\|o5mCs\|oTs\|oGs\|oAs\|oAs\|o5mC] |
| 985 | [o5mCs\|oAs\|oTs\|o5mCp\|o5mCs\|dGs\|dGs\|dGs\|dTs\|dTs\|dTs\|5mCs\|dTs\|dAs\|dGs\|o5mCs\|oTs\|o5mCs\|oTs\|oGs\|oAs\|oAs\|o5mC] |
| 986 | [o5mCs\|oAs\|oTp\|o5mCp\|o5mCs\|dGs\|dGs\|dGs\|dTs\|dTs\|dTs\|5mCs\|dTs\|dAs\|dGs\|o5mCs\|oTs\|o5mCs\|oTs\|oGs\|oAs\|oAs\|o5mC] |
| 987 | [o5mCs\|oAs\|oTs\|o5mCs\|o5mCs\|dGs\|dGs\|dGs\|dTs\|dTs\|dTs\|5mCs\|dTs\|dAs\|dGs\|o5mCs\|oTp\|o5mCs\|oTs\|oGs\|oAs\|oAs\|o5mC] |
| 988 | [o5mCs\|oAs\|oTs\|o5mCs\|o5mCs\|dGs\|dGs\|dGs\|dTs\|dTs\|dTs\|5mCs\|dTs\|dAs\|dGs\|o5mCp\|oTs\|o5mCs\|oTs\|oGs\|oAs\|oAs\|o5mC] |
| 989 | [o5mCs\|oAs\|oTs\|o5mCs\|o5mCs\|dGs\|dGs\|dGs\|dTs\|dTs\|dTs\|5mCs\|dTs\|dAs\|dGs\|o5mCp\|oTp\|o5mCs\|oTs\|oGs\|oAs\|oAs\|o5mC] |
| 990 | [o5mCs\|oAs\|oTp\|o5mCs\|o5mCs\|dGs\|dGs\|dGs\|dTs\|dTs\|dTs\|5mCs\|dTs\|dAs\|dGs\|o5mCs\|oTp\|o5mCs\|oTs\|oGs\|oAs\|oAs\|o5mC] |
| 991 | [o5mCs\|oAs\|oTp\|o5mCs\|o5mCs\|dGs\|dGs\|dGs\|dTs\|dTs\|dTs\|5mCs\|dTs\|dAs\|dGs\|o5mCp\|oTs\|o5mCs\|oTs\|oGs\|oAs\|oAs\|o5mC] |
| 992 | [o5mCs\|oAs\|oTs\|o5mCp\|o5mCs\|dGs\|dGs\|dGs\|dTs\|dTs\|dTs\|5mCs\|dTs\|dAs\|dGs\|o5mCs\|oTp\|o5mCs\|oTs\|oGs\|oAs\|oAs\|o5mC] |
| 993 | [o5mCs\|oAs\|oTs\|o5mCp\|o5mCs\|dGs\|dGs\|dGs\|dTs\|dTs\|dTs\|5mCs\|dTs\|dAs\|dGs\|o5mCp\|oTs\|o5mCs\|oTs\|oGs\|oAs\|oAs\|o5mC] |
| 994 | [o5mCs\|oAs\|oTp\|o5mCs\|o5mCs\|dGs\|dGs\|dGs\|dTs\|dTs\|dTs\|5mCs\|dTs\|dAs\|dGs\|o5mCp\|oTp\|o5mCs\|oTs\|oGs\|oAs\|oAs\|o5mC] |
| 995 | [o5mCs\|oAs\|oTs\|o5mCp\|o5mCs\|dGs\|dGs\|dGs\|dTs\|dTs\|dTs\|5mCs\|dTs\|dAs\|dGs\|o5mCp\|oTp\|o5mCs\|oTs\|oGs\|oAs\|oAs\|o5mC] |
| 996 | [o5mCs\|oAs\|oTp\|o5mCp\|o5mCs\|dGs\|dGs\|dGs\|dTs\|dTs\|dTs\|5mCs\|dTs\|dAs\|dGs\|o5mCs\|oTp\|o5mCs\|oTs\|oGs\|oAs\|oAs\|o5mC] |
| 997 | [o5mCs\|oAs\|oTp\|o5mCp\|o5mCs\|dGs\|dGs\|dGs\|dTs\|dTs\|dTs\|5mCs\|dTs\|dAs\|dGs\|o5mCp\|oTs\|o5mCs\|oTs\|oGs\|oAs\|oAs\|o5mC] |
| 998 | [o5mCs\|oAs\|oTp\|o5mCp\|o5mCs\|dGs\|dGs\|dGs\|dTs\|dTs\|dTs\|5mCs\|dTs\|dAs\|dGs\|o5mCp\|oTp\|o5mCs\|oTs\|oGs\|oAs\|oAs\|o5mC] |
| 999 | [o5mCs\|oAs\|oTs\|o5mCs\|o5mCs\|dGs\|dGs\|dGs\|dTs\|dTs\|dTs\|5mCs\|dTs\|dAs\|dGs\|5mCs\|oTs\|o5mCs\|oTs\|oGs\|oA] |
| 1000 | [o5mCs\|oAs\|oTp\|o5mCs\|o5mCs\|dGs\|dGs\|dGs\|dTs\|dTs\|dTs\|5mCs\|dTs\|dAs\|dGs\|5mCs\|oTs\|o5mCs\|oTs\|oGs\|oA] |
| 1001 | [o5mCs\|oAs\|oTs\|o5mCp\|o5mCs\|dGs\|dGs\|dGs\|dTs\|dTs\|dTs\|5mCs\|dTs\|dAs\|dGs\|5mCs\|oTs\|o5mCs\|oTs\|oGs\|oA] |
| 1002 | [o5mCs\|oAs\|oTp\|o5mCp\|o5mCs\|dGs\|dGs\|dGs\|dTs\|dTs\|dTs\|5mCs\|dTs\|dAs\|dGs\|5mCs\|oTs\|o5mCs\|oTs\|oGs\|oA] |
| 1003 | [o5mCs\|oAs\|oTs\|o5mCs\|o5mCs\|dGs\|dGs\|dGs\|dTs\|dTs\|dTs\|5mCs\|dTs\|dAs\|dGs\|5mCs\|oTp\|o5mCs\|oTs\|oGs\|oA] |
| 1004 | [o5mCs\|oAs\|oTs\|o5mCs\|o5mCs\|dGs\|dGs\|dGs\|dTs\|dTs\|dTs\|5mCs\|dTs\|dAs\|dGs\|5mCp\|oTs\|o5mCs\|oTs\|oGs\|oA] |
| 1005 | [o5mCs\|oAs\|oTs\|o5mCs\|o5mCs\|dGs\|dGs\|dGs\|dTs\|dTs\|dTs\|5mCs\|dTs\|dAs\|dGs\|5mCp\|oTp\|o5mCs\|oTs\|oGs\|oA] |
| 1006 | [o5mCs\|oAs\|oTp\|o5mCs\|o5mCs\|dGs\|dGs\|dGs\|dTs\|dTs\|dTs\|5mCs\|dTs\|dAs\|dGs\|5mCs\|oTp\|o5mCs\|oTs\|oGs\|oA] |
| 1007 | [o5mCs\|oAs\|oTp\|o5mCs\|o5mCs\|dGs\|dGs\|dGs\|dTs\|dTs\|dTs\|5mCs\|dTs\|dAs\|dGs\|5mCp\|oTs\|o5mCs\|oTs\|oGs\|oA] |
| 1008 | [o5mCs\|oAs\|oTs\|o5mCp\|o5mCs\|dGs\|dGs\|dGs\|dTs\|dTs\|dTs\|5mCs\|dTs\|dAs\|dGs\|5mCs\|oTp\|o5mCs\|oTs\|oGs\|oA] |
| 1009 | [o5mCs\|oAs\|oTs\|o5mCp\|o5mCs\|dGs\|dGs\|dGs\|dTs\|dTs\|dTs\|5mCs\|dTs\|dAs\|dGs\|5mCp\|oTs\|o5mCs\|oTs\|oGs\|oA] |
| 1010 | [o5mCs\|oAs\|oTp\|o5mCs\|o5mCs\|dGs\|dGs\|dGs\|dTs\|dTs\|dTs\|5mCs\|dTs\|dAs\|dGs\|5mCp\|oTp\|o5mCs\|oTs\|oGs\|oA] |
| 1011 | [o5mCs\|oAs\|oTs\|o5mCp\|o5mCs\|dGs\|dGs\|dGs\|dTs\|dTs\|dTs\|5mCs\|dTs\|dAs\|dGs\|5mCp\|oTp\|o5mCs\|oTs\|oGs\|oA] |
| 1012 | [o5mCs\|oAs\|oTp\|o5mCp\|o5mCs\|dGs\|dGs\|dGs\|dTs\|dTs\|dTs\|5mCs\|dTs\|dAs\|dGs\|5mCs\|oTp\|o5mCs\|oTs\|oGs\|oA] |
| 1013 | [o5mCs\|oAs\|oTp\|o5mCp\|o5mCs\|dGs\|dGs\|dGs\|dTs\|dTs\|dTs\|5mCs\|dTs\|dAs\|dGs\|5mCp\|oTs\|o5mCs\|oTs\|oGs\|oA] |
| 1014 | [o5mCs\|oAs\|oTp\|o5mCp\|o5mCs\|dGs\|dGs\|dGs\|dTs\|dTs\|dTs\|5mCs\|dTs\|dAs\|dGs\|5mCp\|oTp\|o5mCs\|oTs\|oGs\|oA] |
| 1015 | [o5mCs\|oAs\|oTs\|o5mCs\|o5mCs\|dGs\|dGs\|dGs\|dTs\|dTs\|dTs\|5mCs\|dTs\|dAs\|dGs\|5mCs\|dTs\|o5mCs\|oTs\|oGs\|oAs\|oA] |
| 1016 | [o5mCs\|oAs\|oTp\|o5mCs\|o5mCs\|dGs\|dGs\|dGs\|dTs\|dTs\|dTs\|5mCs\|dTs\|dAs\|dGs\|5mCs\|dTs\|o5mCs\|oTs\|oGs\|oAs\|oA] |
| 1017 | [o5mCs\|oAs\|oTs\|o5mCp\|o5mCs\|dGs\|dGs\|dGs\|dTs\|dTs\|dTs\|5mCs\|dTs\|dAs\|dGs\|5mCs\|dTs\|o5mCs\|oTs\|oGs\|oAs\|oA] |
| 1018 | [o5mCs\|oAs\|oTp\|o5mCp\|o5mCs\|dGs\|dGs\|dGs\|dTs\|dTs\|dTs\|5mCs\|dTs\|dAs\|dGs\|5mCs\|dTs\|o5mCs\|oTs\|oGs\|oAs\|oA] |
| 1019 | [o5mCs\|oAs\|oTs\|o5mCs\|o5mCs\|dGs\|dGs\|dGs\|dTs\|dTs\|dTs\|5mCs\|dTs\|dAs\|dGs\|5mCs\|dTp\|o5mCs\|oTs\|oGs\|oAs\|oA] |
| 1020 | [o5mCs\|oAs\|oTs\|o5mCs\|o5mCs\|dGs\|dGs\|dGs\|dTs\|dTs\|dTs\|5mCs\|dTs\|dAs\|dGs\|5mCp\|dTs\|o5mCs\|oTs\|oGs\|oAs\|oA] |
| 1021 | [o5mCs\|oAs\|oTs\|o5mCs\|o5mCs\|dGs\|dGs\|dGs\|dTs\|dTs\|dTs\|5mCs\|dTs\|dAs\|dGs\|5mCp\|dTp\|o5mCs\|oTs\|oGs\|oAs\|oA] |
| 1022 | [o5mCs\|oAs\|oTp\|o5mCs\|o5mCs\|dGs\|dGs\|dGs\|dTs\|dTs\|dTs\|5mCs\|dTs\|dAs\|dGs\|5mCs\|dTp\|o5mCs\|oTs\|oGs\|oAs\|oA] |
| 1023 | [o5mCs\|oAs\|oTp\|o5mCs\|o5mCs\|dGs\|dGs\|dGs\|dTs\|dTs\|dTs\|5mCs\|dTs\|dAs\|dGs\|5mCp\|dTs\|o5mCs\|oTs\|oGs\|oAs\|oA] |
| 1024 | [o5mCs\|oAs\|oTs\|o5mCp\|o5mCs\|dGs\|dGs\|dGs\|dTs\|dTs\|dTs\|5mCs\|dTs\|dAs\|dGs\|5mCs\|dTp\|o5mCs\|oTs\|oGs\|oAs\|oA] |
| 1025 | [o5mCs\|oAs\|oTs\|o5mCp\|o5mCs\|dGs\|dGs\|dGs\|dTs\|dTs\|dTs\|5mCs\|dTs\|dAs\|dGs\|5mCp\|dTs\|o5mCs\|oTs\|oGs\|oAs\|oA] |
| 1026 | [o5mCs\|oAs\|oTp\|o5mCs\|o5mCs\|dGs\|dGs\|dGs\|dTs\|dTs\|dTs\|5mCs\|dTs\|dAs\|dGs\|5mCp\|dTp\|o5mCs\|oTs\|oGs\|oAs\|oA] |
| 1027 | [o5mCs\|oAs\|oTs\|o5mCp\|o5mCs\|dGs\|dGs\|dGs\|dTs\|dTs\|dTs\|5mCs\|dTs\|dAs\|dGs\|5mCp\|dTp\|o5mCs\|oTs\|oGs\|oAs\|oA] |
| 1028 | [o5mCs\|oAs\|oTp\|o5mCp\|o5mCs\|dGs\|dGs\|dGs\|dTs\|dTs\|dTs\|5mCs\|dTs\|dAs\|dGs\|5mCs\|dTp\|o5mCs\|oTs\|oGs\|oAs\|oA] |
| 1029 | [o5mCs\|oAs\|oTp\|o5mCp\|o5mCs\|dGs\|dGs\|dGs\|dTs\|dTs\|dTs\|5mCs\|dTs\|dAs\|dGs\|5mCp\|dTs\|o5mCs\|oTs\|oGs\|oAs\|oA] |
| 1030 | [o5mCs\|oAs\|oTp\|o5mCp\|o5mCs\|dGs\|dGs\|dGs\|dTs\|dTs\|dTs\|5mCs\|dTs\|dAs\|dGs\|5mCp\|dTp\|o5mCs\|oTs\|oGs\|oAs\|oA] |
| 1031 | [oTs\|LGs\|oGs\|o5mCs\|oAs\|oGs\|o5mCs\|oTs\|dTs\|dGs\|dTs\|dTs\|5mCs\|dAs\|dTs\|dTs\|dGs\|dAs\|oGs\|oT] |
| 1032 | [oTs\|oGs\|LGs\|o5mCs\|oAs\|oGs\|o5mCs\|oTs\|dTs\|dGs\|dTs\|dTs\|5mCs\|dAs\|dTs\|dTs\|dGs\|dAs\|oGs\|oT] |
| 1033 | [oTs\|oGs\|oGs\|L5mCs\|oAs\|oGs\|o5mCs\|oTs\|dTs\|dGs\|dTs\|dTs\|5mCs\|dAs\|dTs\|dTs\|dGs\|dAs\|oGs\|oT] |
| 1034 | [oTs\|oGs\|oGs\|o5mCs\|LAs\|oGs\|o5mCs\|oTs\|dTs\|dGs\|dTs\|dTs\|5mCs\|dAs\|dTs\|dTs\|dGs\|dAs\|oGs\|oT] |
| 1035 | [oTs\|oGs\|oGs\|o5mCs\|oAs\|LGs\|o5mCs\|oTs\|dTs\|dGs\|dTs\|dTs\|5mCs\|dAs\|dTs\|dTs\|dGs\|dAs\|oGs\|oT] |
| 1036 | [oTs\|oGs\|oGs\|o5mCs\|oAs\|oGs\|L5mCs\|oTs\|dTs\|dGs\|dTs\|dTs\|5mCs\|dAs\|dTs\|dTs\|dGs\|dAs\|oGs\|oT] |
| 1037 | [oTs\|oGs\|dGs\|5mCs\|dAs\|dGs\|5mCs\|dTs\|dTs\|dGs\|dTs\|dTs\|o5mCs\|oAs\|oTs\|oTs\|oGs\|oAs\|LGs\|oT] |
| 1038 | [oTs\|oGs\|dGs\|5mCs\|dAs\|dGs\|5mCs\|dTs\|dTs\|dGs\|dTs\|dTs\|o5mCs\|oAs\|oTs\|oTs\|oGs\|LAs\|oGs\|oT] |
| 1039 | [oTs\|oGs\|dGs\|5mCs\|dAs\|dGs\|5mCs\|dTs\|dTs\|dGs\|dTs\|dTs\|o5mCs\|oAs\|oTs\|oTs\|LGs\|oAs\|oGs\|oT] |
| 1040 | [oTs\|oGs\|dGs\|5mCs\|dAs\|dGs\|5mCs\|dTs\|dTs\|dGs\|dTs\|dTs\|o5mCs\|oAs\|oTs\|LTs\|oGs\|oAs\|oGs\|oT] |
| 1041 | [oTs\|oGs\|dGs\|5mCs\|dAs\|dGs\|5mCs\|dTs\|dTs\|dGs\|dTs\|dTs\|o5mCs\|oAs\|LTs\|oTs\|oGs\|oAs\|oGs\|oT] |
| 1042 | [oTs\|oGs\|dGs\|5mCs\|dAs\|dGs\|5mCs\|dTs\|dTs\|dGs\|dTs\|dTs\|o5mCs\|LAs\|oTs\|oTs\|oGs\|oAs\|oGs\|oT] |
| 1043 | [oTs\|LGs\|oGs\|o5mCs\|oAs\|oGs\|o5mCs\|dTs\|dTs\|dGs\|dTs\|dTs\|5mCs\|dAs\|dTs\|dTs\|dGs\|oAs\|oGs\|oT] |
| 1044 | [oTs\|oGs\|LGs\|o5mCs\|oAs\|oGs\|o5mCs\|dTs\|dTs\|dGs\|dTs\|dTs\|5mCs\|dAs\|dTs\|dTs\|dGs\|oAs\|oGs\|oT] |
| 1045 | [oTs\|oGs\|oGs\|L5mCs\|oAs\|oGs\|o5mCs\|dTs\|dTs\|dGs\|dTs\|dTs\|5mCs\|dAs\|dTs\|dTs\|dGs\|oAs\|oGs\|oT] |
| 1046 | [oTs\|oGs\|oGs\|o5mCs\|LAs\|oGs\|o5mCs\|dTs\|dTs\|dGs\|dTs\|dTs\|5mCs\|dAs\|dTs\|dTs\|dGs\|oAs\|oGs\|oT] |
| 1047 | [oTs\|oGs\|oGs\|o5mCs\|oAs\|LGs\|o5mCs\|dTs\|dTs\|dGs\|dTs\|dTs\|5mCs\|dAs\|dTs\|dTs\|dGs\|oAs\|oGs\|oT] |
| 1048 | [oTs\|oGs\|oGs\|5mCs\|dAs\|dGs\|5mCs\|dTs\|dTs\|dGs\|dTs\|dTs\|5mCs\|oAs\|oTs\|oTs\|oGs\|oAs\|LGs\|oT] |
| 1049 | [oTs\|oGs\|oGs\|5mCs\|dAs\|dGs\|5mCs\|dTs\|dTs\|dGs\|dTs\|dTs\|5mCs\|oAs\|oTs\|oTs\|oGs\|LAs\|oGs\|oT] |
| 1050 | [oTs\|oGs\|oGs\|5mCs\|dAs\|dGs\|5mCs\|dTs\|dTs\|dGs\|dTs\|dTs\|5mCs\|oAs\|oTs\|oTs\|LGs\|oAs\|oGs\|oT] |
| 1051 | [oTs\|oGs\|oGs\|5mCs\|dAs\|dGs\|5mCs\|dTs\|dTs\|dGs\|dTs\|dTs\|5mCs\|oAs\|oTs\|LTs\|oGs\|oAs\|oGs\|oT] |
| 1052 | [oTs\|oGs\|oGs\|5mCs\|dAs\|dGs\|5mCs\|dTs\|dTs\|dGs\|dTs\|dTs\|5mCs\|oAs\|LTs\|oTs\|oGs\|oAs\|oGs\|oT] |
| 1053 | [oTs\|LGs\|oGs\|o5mCs\|oAs\|oGs\|o5mCs\|dTs\|dTs\|dGs\|dTs\|dTs\|5mCs\|dAs\|dTs\|dTs\|dGs\|oAs\|oG] |
| 1054 | [oTs\|oGs\|LGs\|o5mCs\|oAs\|oGs\|o5mCs\|dTs\|dTs\|dGs\|dTs\|dTs\|5mCs\|dAs\|dTs\|dTs\|dGs\|oAs\|oG] |
| 1055 | [oTs\|oGs\|oGs\|L5mCs\|oAs\|oGs\|o5mCs\|dTs\|dTs\|dGs\|dTs\|dTs\|5mCs\|dAs\|dTs\|dTs\|dGs\|oAs\|oG] |
| 1056 | [oTs\|oGs\|oGs\|o5mCs\|LAs\|oGs\|o5mCs\|dTs\|dTs\|dGs\|dTs\|dTs\|5mCs\|dAs\|dTs\|dTs\|dGs\|oAs\|oG] |
| 1057 | [oTs\|oGs\|oGs\|o5mCs\|oAs\|LGs\|o5mCs\|dTs\|dTs\|dGs\|dTs\|dTs\|5mCs\|dAs\|dTs\|dTs\|dGs\|oAs\|oG] |
| 1058 | [oGs\|oGs\|5mCs\|dAs\|dGs\|5mCs\|dTs\|dTs\|dGs\|dTs\|dTs\|5mCs\|oAs\|oTs\|oTs\|oGs\|oAs\|LGs\|oT] |
| 1059 | [oGs\|oGs\|5mCs\|dAs\|dGs\|5mCs\|dTs\|dTs\|dGs\|dTs\|dTs\|5mCs\|oAs\|oTs\|oTs\|oGs\|LAs\|oGs\|oT] |
| 1060 | [oGs\|oGs\|5mCs\|dAs\|dGs\|5mCs\|dTs\|dTs\|dGs\|dTs\|dTs\|5mCs\|oAs\|oTs\|oTs\|LGs\|oAs\|oGs\|oT] |
| 1061 | [oGs\|oGs\|5mCs\|dAs\|dGs\|5mCs\|dTs\|dTs\|dGs\|dTs\|dTs\|5mCs\|oAs\|oTs\|LTs\|oGs\|oAs\|oGs\|oT] |
| 1062 | [oGs\|oGs\|5mCs\|dAs\|dGs\|5mCs\|dTs\|dTs\|dGs\|dTs\|dTs\|5mCs\|oAs\|LTs\|oTs\|oGs\|oAs\|oGs\|oT] |
| 1063 | [oTs\|LGs\|oGs\|o5mCs\|oAs\|oGs\|5mCs\|dTs\|dTs\|dGs\|dTs\|dTs\|5mCs\|dAs\|dTs\|dTs\|oGs\|oAs\|oGs\|oT] |
| 1064 | [oTs\|oGs\|LGs\|o5mCs\|oAs\|oGs\|5mCs\|dTs\|dTs\|dGs\|dTs\|dTs\|5mCs\|dAs\|dTs\|dTs\|oGs\|oAs\|oGs\|oT] |
| 1065 | [oTs\|oGs\|oGs\|L5mCs\|oAs\|oGs\|5mCs\|dTs\|dTs\|dGs\|dTs\|dTs\|5mCs\|dAs\|dTs\|dTs\|oGs\|oAs\|oGs\|oT] |
| 1066 | [oTs\|oGs\|oGs\|o5mCs\|LAs\|oGs\|5mCs\|dTs\|dTs\|dGs\|dTs\|dTs\|5mCs\|dAs\|dTs\|dTs\|oGs\|oAs\|oGs\|oT] |
| 1067 | [oTs\|oGs\|oGs\|o5mCs\|dAs\|dGs\|5mCs\|dTs\|dTs\|dGs\|dTs\|dTs\|5mCs\|dAs\|oTs\|oTs\|oGs\|oAs\|LGs\|oT] |
| 1068 | [oTs\|oGs\|oGs\|o5mCs\|dAs\|dGs\|5mCs\|dTs\|dTs\|dGs\|dTs\|dTs\|5mCs\|dAs\|oTs\|oTs\|oGs\|LAs\|oGs\|oT] |
| 1069 | [oTs\|oGs\|oGs\|o5mCs\|dAs\|dGs\|5mCs\|dTs\|dTs\|dGs\|dTs\|dTs\|5mCs\|dAs\|oTs\|oTs\|LGs\|oAs\|oGs\|oT] |
| 1070 | [oTs\|oGs\|oGs\|o5mCs\|dAs\|dGs\|5mCs\|dTs\|dTs\|dGs\|dTs\|dTs\|5mCs\|dAs\|oTs\|LTs\|oGs\|oAs\|oGs\|oT] |
| 1071 | [oTs\|LGs\|oGs\|o5mCs\|oAs\|oGs\|5mCs\|dTs\|dTs\|dGs\|dTs\|dTs\|5mCs\|dAs\|dTs\|dTs\|oGs\|oAs\|oG] |
| 1072 | [oTs\|oGs\|LGs\|o5mCs\|oAs\|oGs\|5mCs\|dTs\|dTs\|dGs\|dTs\|dTs\|5mCs\|dAs\|dTs\|dTs\|oGs\|oAs\|oG] |
| 1073 | [oTs\|oGs\|oGs\|L5mCs\|oAs\|oGs\|5mCs\|dTs\|dTs\|dGs\|dTs\|dTs\|5mCs\|dAs\|dTs\|dTs\|oGs\|oAs\|oG] |
| 1074 | [oTs\|oGs\|oGs\|o5mCs\|LAs\|oGs\|5mCs\|dTs\|dTs\|dGs\|dTs\|dTs\|5mCs\|dAs\|dTs\|dTs\|oGs\|oAs\|oG] |
| 1075 | [oTs\|oGs\|oGs\|5mCs\|dAs\|dGs\|5mCs\|dTs\|dTs\|dGs\|dTs\|dTs\|5mCs\|dAs\|oTs\|oTs\|oGs\|oAs\|LGs\|oT] |
| 1076 | [oTs\|oGs\|oGs\|5mCs\|dAs\|dGs\|5mCs\|dTs\|dTs\|dGs\|dTs\|dTs\|5mCs\|dAs\|oTs\|oTs\|oGs\|LAs\|oGs\|oT] |
| 1077 | [oTs\|oGs\|oGs\|5mCs\|dAs\|dGs\|5mCs\|dTs\|dTs\|dGs\|dTs\|dTs\|5mCs\|dAs\|oTs\|oTs\|LGs\|oAs\|oGs\|oT] |
| 1078 | [oTs\|LGs\|oGs\|o5mCs\|oAs\|oGs\|5mCs\|dTs\|dTs\|dGs\|dTs\|dTs\|5mCs\|dAs\|dTs\|dTs\|oGs\|oA] |
| 1079 | [oTs\|oGs\|LGs\|o5mCs\|oAs\|oGs\|5mCs\|dTs\|dTs\|dGs\|dTs\|dTs\|5mCs\|dAs\|dTs\|dTs\|oGs\|oA] |
| 1080 | [oTs\|oGs\|oGs\|L5mCs\|oAs\|oGs\|5mCs\|dTs\|dTs\|dGs\|dTs\|dTs\|5mCs\|dAs\|dTs\|dTs\|oGs\|oA] |
| 1081 | [oTs\|oGs\|oGs\|o5mCs\|LAs\|oGs\|5mCs\|dTs\|dTs\|dGs\|dTs\|dTs\|5mCs\|dAs\|dTs\|dTs\|oGs\|oA] |
| 1082 | [oGs\|o5mCs\|dAs\|dGs\|5mCs\|dTs\|dTs\|dGs\|dTs\|dTs\|5mCs\|dAs\|oTs\|oTs\|oGs\|oAs\|LGs\|oT] |
| 1083 | [oGs\|o5mCs\|dAs\|dGs\|5mCs\|dTs\|dTs\|dGs\|dTs\|dTs\|5mCs\|dAs\|oTs\|oTs\|oGs\|LAs\|oGs\|oT] |
| 1084 | [oGs\|o5mCs\|dAs\|dGs\|5mCs\|dTs\|dTs\|dGs\|dTs\|dTs\|5mCs\|dAs\|oTs\|oTs\|LGs\|oAs\|oGs\|oT] |
| 1085 | [oGs\|o5mCs\|dAs\|dGs\|5mCs\|dTs\|dTs\|dGs\|dTs\|dTs\|5mCs\|dAs\|oTs\|LTs\|oGs\|oAs\|oGs\|oT] |
| 1086 | [oTs\|LGs\|oGs\|o5mCs\|oAs\|dGs\|5mCs\|dTs\|dTs\|dGs\|dTs\|dTs\|5mCs\|dAs\|dTs\|oTs\|oGs\|oAs\|oGs\|oT] |
| 1087 | [oTs\|oGs\|LGs\|o5mCs\|oAs\|dGs\|5mCs\|dTs\|dTs\|dGs\|dTs\|dTs\|5mCs\|dAs\|dTs\|oTs\|oGs\|oAs\|oGs\|oT] |
| 1088 | [oTs\|oGs\|oGs\|L5mCs\|oAs\|dGs\|5mCs\|dTs\|dTs\|dGs\|dTs\|dTs\|5mCs\|dAs\|dTs\|oTs\|oGs\|oAs\|oGs\|oT] |
| 1089 | [oTs\|oGs\|oGs\|o5mCs\|oAs\|dGs\|5mCs\|dTs\|dTs\|dGs\|dTs\|dTs\|5mCs\|dAs\|dTs\|oTs\|oGs\|oAs\|LGs\|oT] |
| 1090 | [oTs\|oGs\|oGs\|o5mCs\|oAs\|dGs\|5mCs\|dTs\|dTs\|dGs\|dTs\|dTs\|5mCs\|dAs\|dTs\|oTs\|oGs\|LAs\|oGs\|oT] |
| 1091 | [oTs\|oGs\|oGs\|o5mCs\|oAs\|dGs\|5mCs\|dTs\|dTs\|dGs\|dTs\|dTs\|5mCs\|dAs\|dTs\|oTs\|LGs\|oAs\|oGs\|oT] |
| 1092 | [oTs\|LGs\|oGs\|o5mCs\|oAs\|dGs\|5mCs\|dTs\|dTs\|dGs\|dTs\|dTs\|5mCs\|dAs\|dTs\|oTs\|oGs\|oAs\|oG] |
| 1093 | [oTs\|oGs\|LGs\|o5mCs\|oAs\|dGs\|5mCs\|dTs\|dTs\|dGs\|dTs\|dTs\|5mCs\|dAs\|dTs\|oTs\|oGs\|oAs\|oG] |
| 1094 | [oTs\|oGs\|oGs\|L5mCs\|oAs\|dGs\|5mCs\|dTs\|dTs\|dGs\|dTs\|dTs\|5mCs\|dAs\|dTs\|oTs\|oGs\|oAs\|oG] |
| 1095 | [oGs\|oGs\|o5mCs\|oAs\|dGs\|5mCs\|dTs\|dTs\|dGs\|dTs\|dTs\|5mCs\|dAs\|dTs\|oTs\|oGs\|oAs\|LGs\|oT] |
| 1096 | [oGs\|oGs\|o5mCs\|oAs\|dGs\|5mCs\|dTs\|dTs\|dGs\|dTs\|dTs\|5mCs\|dAs\|dTs\|oTs\|oGs\|LAs\|oGs\|oT] |
| 1097 | [oGs\|oGs\|o5mCs\|oAs\|dGs\|5mCs\|dTs\|dTs\|dGs\|dTs\|dTs\|5mCs\|dAs\|dTs\|oTs\|LGs\|oAs\|oGs\|oT] |
| 1098 | [oTs\|LGs\|oGs\|o5mCs\|oAs\|dGs\|5mCs\|dTs\|dTs\|dGs\|dTs\|dTs\|5mCs\|dAs\|dTs\|oTs\|oGs\|oA] |
| 1099 | [oTs\|oGs\|LGs\|o5mCs\|oAs\|dGs\|5mCs\|dTs\|dTs\|dGs\|dTs\|dTs\|5mCs\|dAs\|dTs\|oTs\|oGs\|oA] |
| 1100 | [oTs\|oGs\|oGs\|L5mCs\|oAs\|dGs\|5mCs\|dTs\|dTs\|dGs\|dTs\|dTs\|5mCs\|dAs\|dTs\|oTs\|oGs\|oA] |
| 1101 | [oGs\|o5mCs\|oAs\|dGs\|5mCs\|dTs\|dTs\|dGs\|dTs\|dTs\|5mCs\|dAs\|dTs\|oTs\|oGs\|oAs\|LGs\|oT] |
| 1102 | [oGs\|o5mCs\|oAs\|dGs\|5mCs\|dTs\|dTs\|dGs\|dTs\|dTs\|5mCs\|dAs\|dTs\|oTs\|oGs\|LAs\|oGs\|oT] |
| 1103 | [oGs\|o5mCs\|oAs\|dGs\|5mCs\|dTs\|dTs\|dGs\|dTs\|dTs\|5mCs\|dAs\|dTs\|oTs\|LGs\|oAs\|oGs\|oT] |
| 1104 | [oTs\|LGs\|oGs\|o5mCs\|oAs\|dGs\|5mCs\|dTs\|dTs\|dGs\|dTs\|dTs\|5mCs\|dAs\|dTs\|oTs\|oG] |
| 1105 | [oTs\|oGs\|LGs\|o5mCs\|oAs\|dGs\|5mCs\|dTs\|dTs\|dGs\|dTs\|dTs\|5mCs\|dAs\|dTs\|oTs\|oG] |
| 1106 | [oTs\|oGs\|oGs\|L5mCs\|oAs\|dGs\|5mCs\|dTs\|dTs\|dGs\|dTs\|dTs\|5mCs\|dAs\|dTs\|oTs\|oG] |
| 1107 | [o5mCs\|oAs\|dGs\|5mCs\|dTs\|dTs\|dGs\|dTs\|dTs\|5mCs\|dAs\|dTs\|oTs\|oGs\|oAs\|LGs\|oT] |
| 1108 | [o5mCs\|oAs\|dGs\|5mCs\|dTs\|dTs\|dGs\|dTs\|dTs\|5mCs\|dAs\|dTs\|oTs\|oGs\|LAs\|oGs\|oT] |
| 1109 | [o5mCs\|oAs\|dGs\|5mCs\|dTs\|dTs\|dGs\|dTs\|dTs\|5mCs\|dAs\|dTs\|oTs\|LGs\|oAs\|oGs\|oT] |
| 1110 | [oGs\|LGs\|o5mCs\|oAs\|dGs\|5mCs\|dTs\|dTs\|dGs\|dTs\|dTs\|5mCs\|dAs\|dTs\|oTs\|oGs\|oAs\|oGs\|oT] |
| 1111 | [oGs\|oGs\|L5mCs\|oAs\|dGs\|5mCs\|dTs\|dTs\|dGs\|dTs\|dTs\|5mCs\|dAs\|dTs\|oTs\|oGs\|oAs\|oGs\|oT] |
| 1112 | [oTs\|oGs\|oGs\|o5mCs\|oAs\|dGs\|5mCs\|dTs\|dTs\|dGs\|dTs\|dTs\|5mCs\|dAs\|dTs\|oTs\|oGs\|LAs\|oG] |
| 1113 | [oTs\|oGs\|oGs\|o5mCs\|oAs\|dGs\|5mCs\|dTs\|dTs\|dGs\|dTs\|dTs\|5mCs\|dAs\|dTs\|oTs\|LGs\|oAs\|oG] |
| 1114 | [oGs\|LGs\|o5mCs\|oAs\|dGs\|5mCs\|dTs\|dTs\|dGs\|dTs\|dTs\|5mCs\|dAs\|dTs\|oTs\|oGs\|oAs\|oG] |
| 1115 | [oGs\|oGs\|L5mCs\|oAs\|dGs\|5mCs\|dTs\|dTs\|dGs\|dTs\|dTs\|5mCs\|dAs\|dTs\|oTs\|oGs\|oAs\|oG] |
| 1116 | [oGs\|oGs\|o5mCs\|oAs\|dGs\|5mCs\|dTs\|dTs\|dGs\|dTs\|dTs\|5mCs\|dAs\|dTs\|oTs\|oGs\|LAs\|oG] |
| 1117 | [oGs\|oGs\|o5mCs\|oAs\|dGs\|5mCs\|dTs\|dTs\|dGs\|dTs\|dTs\|5mCs\|dAs\|dTs\|oTs\|LGs\|oAs\|oG] |
| 1118 | [oGs\|LGs\|o5mCs\|oAs\|dGs\|5mCs\|dTs\|dTs\|dGs\|dTs\|dTs\|5mCs\|dAs\|dTs\|oTs\|oGs\|oA] |
| 1119 | [oGs\|oGs\|L5mCs\|oAs\|dGs\|5mCs\|dTs\|dTs\|dGs\|dTs\|dTs\|5mCs\|dAs\|dTs\|oTs\|oGs\|oA] |
| 1120 | [oGs\|oGs\|o5mCs\|oAs\|dGs\|5mCs\|dTs\|dTs\|dGs\|dTs\|dTs\|5mCs\|dAs\|dTs\|oTs\|LGs\|oA] |
| 1121 | [oTs\|oGs\|oGs\|o5mCs\|oAs\|oGs\|o5mCs\|oTs\|dTs\|dGs\|dTs\|dTs\|5mCs\|dAs\|dTs\|dTs\|dGs\|dAs\|oGs\|oT] |
| 1122 | [oTs\|oGs\|dGs\|5mCs\|dAs\|dGs\|5mCs\|dTs\|dTs\|dGs\|dTs\|dTs\|o5mCs\|oAs\|oTs\|oTs\|oGs\|oAs\|oGs\|oT] |
| 1123 | [oTs\|oGs\|oGs\|o5mCs\|oAs\|oGs\|o5mCs\|dTs\|dTs\|dGs\|dTs\|dTs\|5mCs\|dAs\|dTs\|dTs\|dGs\|oAs\|oGs\|oT] |
| 1124 | [oTs\|oGs\|oGs\|5mCs\|dAs\|dGs\|5mCs\|dTs\|dTs\|dGs\|dTs\|dTs\|5mCs\|oAs\|oTs\|oTs\|oGs\|oAs\|oGs\|oT] |
| 1125 | [oTs\|oGs\|oGs\|o5mCs\|oAs\|oGs\|o5mCs\|dTs\|dTs\|dGs\|dTs\|dTs\|5mCs\|dAs\|dTs\|dTs\|dGs\|oAs\|oG] |
| 1126 | [oGs\|oGs\|5mCs\|dAs\|dGs\|5mCs\|dTs\|dTs\|dGs\|dTs\|dTs\|5mCs\|oAs\|oTs\|oTs\|oGs\|oAs\|oGs\|oT] |
| 1127 | [oTs\|oGs\|oGs\|o5mCs\|oAs\|oGs\|5mCs\|dTs\|dTs\|dGs\|dTs\|dTs\|5mCs\|dAs\|dTs\|dTs\|oGs\|oAs\|oGs\|oT] |
| 1128 | [oTs\|oGs\|oGs\|o5mCs\|dAs\|dGs\|5mCs\|dTs\|dTs\|dGs\|dTs\|dTs\|5mCs\|dAs\|oTs\|oTs\|oGs\|oAs\|oGs\|oT] |
| 1129 | [oTs\|oGs\|oGs\|o5mCs\|oAs\|oGs\|5mCs\|dTs\|dTs\|dGs\|dTs\|dTs\|5mCs\|dAs\|dTs\|dTs\|oGs\|oAs\|oG] |
| 1130 | [oTs\|oGs\|oGs\|5mCs\|dAs\|dGs\|5mCs\|dTs\|dTs\|dGs\|dTs\|dTs\|5mCs\|dAs\|oTs\|oTs\|oGs\|oAs\|oGs\|oT] |
| 1131 | [oTs\|oGs\|oGs\|o5mCs\|oAs\|oGs\|5mCs\|dTs\|dTs\|dGs\|dTs\|dTs\|5mCs\|dAs\|dTs\|dTs\|oGs\|oA] |
| 1132 | [oGs\|o5mCs\|dAs\|dGs\|5mCs\|dTs\|dTs\|dGs\|dTs\|dTs\|5mCs\|dAs\|oTs\|oTs\|oGs\|oAs\|oGs\|oT] |
| 1133 | [oTs\|oGs\|oGs\|o5mCs\|oAs\|dGs\|5mCs\|dTs\|dTs\|dGs\|dTs\|dTs\|5mCs\|dAs\|dTs\|oTs\|oGs\|oAs\|oGs\|oT] |
| 1134 | [oTs\|oGs\|oGs\|o5mCs\|oAs\|dGs\|5mCs\|dTs\|dTs\|dGs\|dTs\|dTs\|5mCs\|dAs\|dTs\|oTs\|oGs\|oAs\|oG] |
| 1135 | [oTs\|oGs\|oGs\|o5mCs\|oAs\|dGs\|5mCs\|dTs\|dTs\|dGs\|dTs\|dTs\|5mCs\|dAs\|dTs\|oTs\|oGs\|oA] |
| 1136 | [oGs\|o5mCs\|oAs\|dGs\|5mCs\|dTs\|dTs\|dGs\|dTs\|dTs\|5mCs\|dAs\|dTs\|oTs\|oGs\|oAs\|oGs\|oT] |
| 1137 | [oTs\|oGs\|oGs\|o5mCs\|oAs\|dGs\|5mCs\|dTs\|dTs\|dGs\|dTs\|dTs\|5mCs\|dAs\|dTs\|oTs\|oG] |
| 1138 | [o5mCs\|oAs\|dGs\|5mCs\|dTs\|dTs\|dGs\|dTs\|dTs\|5mCs\|dAs\|dTs\|oTs\|oGs\|oAs\|oGs\|oT] |
| 1139 | [oGs\|oGs\|o5mCs\|oAs\|dGs\|5mCs\|dTs\|dTs\|dGs\|dTs\|dTs\|5mCs\|dAs\|dTs\|oTs\|oGs\|oAs\|oGs\|oT] |
| 1140 | [oGs\|oGs\|o5mCs\|oAs\|dGs\|5mCs\|dTs\|dTs\|dGs\|dTs\|dTs\|5mCs\|dAs\|dTs\|oTs\|oGs\|oAs\|oG] |
| 1141 | [oGs\|oGs\|o5mCs\|oAs\|dGs\|5mCs\|dTs\|dTs\|dGs\|dTs\|dTs\|5mCs\|dAs\|dTs\|oTs\|oGs\|oA] |
| 1142 | [oTs\|oGs\|oGp\|o5mCs\|oAs\|dGs\|5mCs\|dTs\|dTs\|dGs\|dTs\|dTs\|5mCs\|dAs\|dTs\|oTs\|oGs\|oAs\|oGs\|oT] |
| 1143 | [oTs\|oGs\|oGs\|o5mCp\|oAs\|dGs\|5mCs\|dTs\|dTs\|dGs\|dTs\|dTs\|5mCs\|dAs\|dTs\|oTs\|oGs\|oAs\|oGs\|oT] |
| 1144 | [oTs\|oGs\|oGp\|o5mCp\|oAs\|dGs\|5mCs\|dTs\|dTs\|dGs\|dTs\|dTs\|5mCs\|dAs\|dTs\|oTs\|oGs\|oAs\|oGs\|oT] |
| 1145 | [oTs\|oGs\|oGs\|o5mCs\|oAs\|dGs\|5mCs\|dTs\|dTs\|dGs\|dTs\|dTs\|5mCs\|dAs\|dTs\|oTs\|oGp\|oAs\|oGs\|oT] |
| 1146 | [oTs\|oGs\|oGs\|o5mCs\|oAs\|dGs\|5mCs\|dTs\|dTs\|dGs\|dTs\|dTs\|5mCs\|dAs\|dTs\|oTp\|oGs\|oAs\|oGs\|oT] |
| 1147 | [oTs\|oGs\|oGs\|o5mCs\|oAs\|dGs\|5mCs\|dTs\|dTs\|dGs\|dTs\|dTs\|5mCs\|dAs\|dTs\|oTp\|oGp\|oAs\|oGs\|oT] |
| 1148 | [oTs\|oGs\|oGp\|o5mCs\|oAs\|dGs\|5mCs\|dTs\|dTs\|dGs\|dTs\|dTs\|5mCs\|dAs\|dTs\|oTs\|oGp\|oAs\|oGs\|oT] |
| 1149 | [oTs\|oGs\|oGp\|o5mCs\|oAs\|dGs\|5mCs\|dTs\|dTs\|dGs\|dTs\|dTs\|5mCs\|dAs\|dTs\|oTp\|oGs\|oAs\|oGs\|oT] |
| 1150 | [oTs\|oGs\|oGs\|o5mCp\|oAs\|dGs\|5mCs\|dTs\|dTs\|dGs\|dTs\|dTs\|5mCs\|dAs\|dTs\|oTs\|oGp\|oAs\|oGs\|oT] |
| 1151 | [oTs\|oGs\|oGs\|o5mCp\|oAs\|dGs\|5mCs\|dTs\|dTs\|dGs\|dTs\|dTs\|5mCs\|dAs\|dTs\|oTp\|oGs\|oAs\|oGs\|oT] |
| 1152 | [oTs\|oGs\|oGp\|o5mCs\|oAs\|dGs\|5mCs\|dTs\|dTs\|dGs\|dTs\|dTs\|5mCs\|dAs\|dTs\|oTp\|oGp\|oAs\|oGs\|oT] |
| 1153 | [oTs\|oGs\|oGs\|o5mCp\|oAs\|dGs\|5mCs\|dTs\|dTs\|dGs\|dTs\|dTs\|5mCs\|dAs\|dTs\|oTp\|oGp\|oAs\|oGs\|oT] |
| 1154 | [oTs\|oGs\|oGp\|o5mCp\|oAs\|dGs\|5mCs\|dTs\|dTs\|dGs\|dTs\|dTs\|5mCs\|dAs\|dTs\|oTs\|oGp\|oAs\|oGs\|oT] |
| 1155 | [oTs\|oGs\|oGp\|o5mCp\|oAs\|dGs\|5mCs\|dTs\|dTs\|dGs\|dTs\|dTs\|5mCs\|dAs\|dTs\|oTp\|oGs\|oAs\|oGs\|oT] |
| 1156 | [oTs\|oGs\|oGp\|o5mCp\|oAs\|dGs\|5mCs\|dTs\|dTs\|dGs\|dTs\|dTs\|5mCs\|dAs\|dTs\|oTp\|oGp\|oAs\|oGs\|oT] |
| 1157 | [oTs\|oGs\|oGs\|o5mCs\|oAs\|dGs\|5mCs\|dTs\|dTs\|dGs\|dTs\|dTs\|5mCs\|dAs\|dTs\|oTs\|oGs\|oAs\|oGs\|oTs\|oA] |
| 1158 | [oTs\|oGs\|oGp\|o5mCs\|oAs\|dGs\|5mCs\|dTs\|dTs\|dGs\|dTs\|dTs\|5mCs\|dAs\|dTs\|oTs\|oGs\|oAs\|oGs\|oTs\|oA] |
| 1159 | [oTs\|oGs\|oGs\|o5mCp\|oAs\|dGs\|5mCs\|dTs\|dTs\|dGs\|dTs\|dTs\|5mCs\|dAs\|dTs\|oTs\|oGs\|oAs\|oGs\|oTs\|oA] |
| 1160 | [oTs\|oGs\|oGp\|o5mCp\|oAs\|dGs\|5mCs\|dTs\|dTs\|dGs\|dTs\|dTs\|5mCs\|dAs\|dTs\|oTs\|oGs\|oAs\|oGs\|oTs\|oA] |
| 1161 | [oTs\|oGs\|oGs\|o5mCs\|oAs\|dGs\|5mCs\|dTs\|dTs\|dGs\|dTs\|dTs\|5mCs\|dAs\|dTs\|oTs\|oGp\|oAs\|oGs\|oTs\|oA] |
| 1162 | [oTs\|oGs\|oGs\|o5mCs\|oAs\|dGs\|5mCs\|dTs\|dTs\|dGs\|dTs\|dTs\|5mCs\|dAs\|dTs\|oTp\|oGs\|oAs\|oGs\|oTs\|oA] |
| 1163 | [oTs\|oGs\|oGs\|o5mCs\|oAs\|dGs\|5mCs\|dTs\|dTs\|dGs\|dTs\|dTs\|5mCs\|dAs\|dTs\|oTp\|oGp\|oAs\|oGs\|oTs\|oA] |
| 1164 | [oTs\|oGs\|oGp\|o5mCs\|oAs\|dGs\|5mCs\|dTs\|dTs\|dGs\|dTs\|dTs\|5mCs\|dAs\|dTs\|oTs\|oGp\|oAs\|oGs\|oTs\|oA] |
| 1165 | [oTs\|oGs\|oGp\|o5mCs\|oAs\|dGs\|5mCs\|dTs\|dTs\|dGs\|dTs\|dTs\|5mCs\|dAs\|dTs\|oTp\|oGs\|oAs\|oGs\|oTs\|oA] |
| 1166 | [oTs\|oGs\|oGs\|o5mCp\|oAs\|dGs\|5mCs\|dTs\|dTs\|dGs\|dTs\|dTs\|5mCs\|dAs\|dTs\|oTs\|oGp\|oAs\|oGs\|oTs\|oA] |
| 1167 | [oTs\|oGs\|oGs\|o5mCp\|oAs\|dGs\|5mCs\|dTs\|dTs\|dGs\|dTs\|dTs\|5mCs\|dAs\|dTs\|oTp\|oGs\|oAs\|oGs\|oTs\|oA] |
| 1168 | [oTs\|oGs\|oGp\|o5mCs\|oAs\|dGs\|5mCs\|dTs\|dTs\|dGs\|dTs\|dTs\|5mCs\|dAs\|dTs\|oTp\|oGp\|oAs\|oGs\|oTs\|oA] |
| 1169 | [oTs\|oGs\|oGs\|o5mCp\|oAs\|dGs\|5mCs\|dTs\|dTs\|dGs\|dTs\|dTs\|5mCs\|dAs\|dTs\|oTp\|oGp\|oAs\|oGs\|oTs\|oA] |
| 1170 | [oTs\|oGs\|oGp\|o5mCp\|oAs\|dGs\|5mCs\|dTs\|dTs\|dGs\|dTs\|dTs\|5mCs\|dAs\|dTs\|oTs\|oGp\|oAs\|oGs\|oTs\|oA] |
| 1171 | [oTs\|oGs\|oGp\|o5mCp\|oAs\|dGs\|5mCs\|dTs\|dTs\|dGs\|dTs\|dTs\|5mCs\|dAs\|dTs\|oTp\|oGs\|oAs\|oGs\|oTs\|oA] |
| 1172 | [oTs\|oGs\|oGp\|o5mCp\|oAs\|dGs\|5mCs\|dTs\|dTs\|dGs\|dTs\|dTs\|5mCs\|dAs\|dTs\|oTp\|oGp\|oAs\|oGs\|oTs\|oA] |
| 1173 | [oTs\|oGs\|oGs\|o5mCs\|oAs\|dGs\|5mCs\|dTs\|dTs\|dGs\|dTs\|dTs\|5mCs\|dAs\|dTs\|oTs\|oGs\|oAs\|oGs\|oTs\|oAs\|oT] |
| 1174 | [oTs\|oGs\|oGp\|o5mCs\|oAs\|dGs\|5mCs\|dTs\|dTs\|dGs\|dTs\|dTs\|5mCs\|dAs\|dTs\|oTs\|oGs\|oAs\|oGs\|oTs\|oAs\|oT] |
| 1175 | [oTs\|oGs\|oGs\|o5mCp\|oAs\|dGs\|5mCs\|dTs\|dTs\|dGs\|dTs\|dTs\|5mCs\|dAs\|dTs\|oTs\|oGs\|oAs\|oGs\|oTs\|oAs\|oT] |
| 1176 | [oTs\|oGs\|oGp\|o5mCp\|oAs\|dGs\|5mCs\|dTs\|dTs\|dGs\|dTs\|dTs\|5mCs\|dAs\|dTs\|oTs\|oGs\|oAs\|oGs\|oTs\|oAs\|oT] |
| 1177 | [oTs\|oGs\|oGs\|o5mCs\|oAs\|dGs\|5mCs\|dTs\|dTs\|dGs\|dTs\|dTs\|5mCs\|dAs\|dTs\|oTs\|oGp\|oAs\|oGs\|oTs\|oAs\|oT] |
| 1178 | [oTs\|oGs\|oGs\|o5mCs\|oAs\|dGs\|5mCs\|dTs\|dTs\|dGs\|dTs\|dTs\|5mCs\|dAs\|dTs\|oTp\|oGs\|oAs\|oGs\|oTs\|oAs\|oT] |
| 1179 | [oTs\|oGs\|oGs\|o5mCs\|oAs\|dGs\|5mCs\|dTs\|dTs\|dGs\|dTs\|dTs\|5mCs\|dAs\|dTs\|oTp\|oGp\|oAs\|oGs\|oTs\|oAs\|oT] |
| 1180 | [oTs\|oGs\|oGp\|o5mCs\|oAs\|dGs\|5mCs\|dTs\|dTs\|dGs\|dTs\|dTs\|5mCs\|dAs\|dTs\|oTs\|oGp\|oAs\|oGs\|oTs\|oAs\|oT] |
| 1181 | [oTs\|oGs\|oGp\|o5mCs\|oAs\|dGs\|5mCs\|dTs\|dTs\|dGs\|dTs\|dTs\|5mCs\|dAs\|dTs\|oTp\|oGs\|oAs\|oGs\|oTs\|oAs\|oT] |
| 1182 | [oTs\|oGs\|oGs\|o5mCp\|oAs\|dGs\|5mCs\|dTs\|dTs\|dGs\|dTs\|dTs\|5mCs\|dAs\|dTs\|oTs\|oGp\|oAs\|oGs\|oTs\|oAs\|oT] |
| 1183 | [oTs\|oGs\|oGs\|o5mCp\|oAs\|dGs\|5mCs\|dTs\|dTs\|dGs\|dTs\|dTs\|5mCs\|dAs\|dTs\|oTp\|oGs\|oAs\|oGs\|oTs\|oAs\|oT] |
| 1184 | [oTs\|oGs\|oGp\|o5mCs\|oAs\|dGs\|5mCs\|dTs\|dTs\|dGs\|dTs\|dTs\|5mCs\|dAs\|dTs\|oTp\|oGp\|oAs\|oGs\|oTs\|oAs\|oT] |
| 1185 | [oTs\|oGs\|oGs\|o5mCp\|oAs\|dGs\|5mCs\|dTs\|dTs\|dGs\|dTs\|dTs\|5mCs\|dAs\|dTs\|oTp\|oGp\|oAs\|oGs\|oTs\|oAs\|oT] |
| 1186 | [oTs\|oGs\|oGp\|o5mCp\|oAs\|dGs\|5mCs\|dTs\|dTs\|dGs\|dTs\|dTs\|5mCs\|dAs\|dTs\|oTs\|oGp\|oAs\|oGs\|oTs\|oAs\|oT] |
| 1187 | [oTs\|oGs\|oGp\|o5mCp\|oAs\|dGs\|5mCs\|dTs\|dTs\|dGs\|dTs\|dTs\|5mCs\|dAs\|dTs\|oTp\|oGs\|oAs\|oGs\|oTs\|oAs\|oT] |
| 1188 | [oTs\|oGs\|oGp\|o5mCp\|oAs\|dGs\|5mCs\|dTs\|dTs\|dGs\|dTs\|dTs\|5mCs\|dAs\|dTs\|oTp\|oGp\|oAs\|oGs\|oTs\|oAs\|oT] |
| 1189 | [oTs\|oGs\|oGs\|o5mCs\|oAs\|dGs\|5mCs\|dTs\|dTs\|dGs\|dTs\|dTs\|5mCs\|dAs\|dTs\|oTs\|oGs\|oAs\|oGs\|oTs\|oAs\|oTs\|o5mC] |
| 1190 | [oTs\|oGs\|oGp\|o5mCs\|oAs\|dGs\|5mCs\|dTs\|dTs\|dGs\|dTs\|dTs\|5mCs\|dAs\|dTs\|oTs\|oGs\|oAs\|oGs\|oTs\|oAs\|oTs\|o5mC] |
| 1191 | [oTs\|oGs\|oGs\|o5mCp\|oAs\|dGs\|5mCs\|dTs\|dTs\|dGs\|dTs\|dTs\|5mCs\|dAs\|dTs\|oTs\|oGs\|oAs\|oGs\|oTs\|oAs\|oTs\|o5mC] |
| 1192 | [oTs\|oGs\|oGp\|o5mCp\|oAs\|dGs\|5mCs\|dTs\|dTs\|dGs\|dTs\|dTs\|5mCs\|dAs\|dTs\|oTs\|oGs\|oAs\|oGs\|oTs\|oAs\|oTs\|o5mC] |
| 1193 | [oTs\|oGs\|oGs\|o5mCs\|oAs\|dGs\|5mCs\|dTs\|dTs\|dGs\|dTs\|dTs\|5mCs\|dAs\|dTs\|oTs\|oGp\|oAs\|oGs\|oTs\|oAs\|oTs\|o5mC] |
| 1194 | [oTs\|oGs\|oGs\|o5mCs\|oAs\|dGs\|5mCs\|dTs\|dTs\|dGs\|dTs\|dTs\|5mCs\|dAs\|dTs\|oTp\|oGs\|oAs\|oGs\|oTs\|oAs\|oTs\|o5mC] |
| 1195 | [oTs\|oGs\|oGs\|o5mCs\|oAs\|dGs\|5mCs\|dTs\|dTs\|dGs\|dTs\|dTs\|5mCs\|dAs\|dTs\|oTp\|oGp\|oAs\|oGs\|oTs\|oAs\|oTs\|o5mC] |
| 1196 | [oTs\|oGs\|oGp\|o5mCs\|oAs\|dGs\|5mCs\|dTs\|dTs\|dGs\|dTs\|dTs\|5mCs\|dAs\|dTs\|oTs\|oGp\|oAs\|oGs\|oTs\|oAs\|oTs\|o5mC] |
| 1197 | [oTs\|oGs\|oGp\|o5mCs\|oAs\|dGs\|5mCs\|dTs\|dTs\|dGs\|dTs\|dTs\|5mCs\|dAs\|dTs\|oTp\|oGs\|oAs\|oGs\|oTs\|oAs\|oTs\|o5mC] |
| 1198 | [oTs\|oGs\|oGs\|o5mCp\|oAs\|dGs\|5mCs\|dTs\|dTs\|dGs\|dTs\|dTs\|5mCs\|dAs\|dTs\|oTs\|oGp\|oAs\|oGs\|oTs\|oAs\|oTs\|o5mC] |
| 1199 | [oTs\|oGs\|oGs\|o5mCp\|oAs\|dGs\|5mCs\|dTs\|dTs\|dGs\|dTs\|dTs\|5mCs\|dAs\|dTs\|oTp\|oGs\|oAs\|oGs\|oTs\|oAs\|oTs\|o5mC] |
| 1200 | [oTs\|oGs\|oGp\|o5mCs\|oAs\|dGs\|5mCs\|dTs\|dTs\|dGs\|dTs\|dTs\|5mCs\|dAs\|dTs\|oTp\|oGp\|oAs\|oGs\|oTs\|oAs\|oTs\|o5mC] |
| 1201 | [oTs\|oGs\|oGs\|o5mCp\|oAs\|dGs\|5mCs\|dTs\|dTs\|dGs\|dTs\|dTs\|5mCs\|dAs\|dTs\|oTp\|oGp\|oAs\|oGs\|oTs\|oAs\|oTs\|o5mC] |
| 1202 | [oTs\|oGs\|oGp\|o5mCp\|oAs\|dGs\|5mCs\|dTs\|dTs\|dGs\|dTs\|dTs\|5mCs\|dAs\|dTs\|oTs\|oGp\|oAs\|oGs\|oTs\|oAs\|oTs\|o5mC] |
| 1203 | [oTs\|oGs\|oGp\|o5mCp\|oAs\|dGs\|5mCs\|dTs\|dTs\|dGs\|dTs\|dTs\|5mCs\|dAs\|dTs\|oTp\|oGs\|oAs\|oGs\|oTs\|oAs\|oTs\|o5mC] |
| 1204 | [oTs\|oGs\|oGp\|o5mCp\|oAs\|dGs\|5mCs\|dTs\|dTs\|dGs\|dTs\|dTs\|5mCs\|dAs\|dTs\|oTp\|oGp\|oAs\|oGs\|oTs\|oAs\|oTs\|o5mC] |
| 1205 | [oTs\|oGs\|oGs\|o5mCs\|oAs\|dGs\|5mCs\|dTs\|dTs\|dGs\|dTs\|dTs\|5mCs\|dAs\|dTs\|dTs\|oGs\|oAs\|oGs\|oTs\|oA] |
| 1206 | [oTs\|oGs\|oGp\|o5mCs\|oAs\|dGs\|5mCs\|dTs\|dTs\|dGs\|dTs\|dTs\|5mCs\|dAs\|dTs\|dTs\|oGs\|oAs\|oGs\|oTs\|oA] |
| 1207 | [oTs\|oGs\|oGs\|o5mCp\|oAs\|dGs\|5mCs\|dTs\|dTs\|dGs\|dTs\|dTs\|5mCs\|dAs\|dTs\|dTs\|oGs\|oAs\|oGs\|oTs\|oA] |
| 1208 | [oTs\|oGs\|oGp\|o5mCp\|oAs\|dGs\|5mCs\|dTs\|dTs\|dGs\|dTs\|dTs\|5mCs\|dAs\|dTs\|dTs\|oGs\|oAs\|oGs\|oTs\|oA] |
| 1209 | [oTs\|oGs\|oGs\|o5mCs\|oAs\|dGs\|5mCs\|dTs\|dTs\|dGs\|dTs\|dTs\|5mCs\|dAs\|dTs\|dTs\|oGp\|oAs\|oGs\|oTs\|oA] |
| 1210 | [oTs\|oGs\|oGs\|o5mCs\|oAs\|dGs\|5mCs\|dTs\|dTs\|dGs\|dTs\|dTs\|5mCs\|dAs\|dTs\|dTp\|oGs\|oAs\|oGs\|oTs\|oA] |
| 1211 | [oTs\|oGs\|oGs\|o5mCs\|oAs\|dGs\|5mCs\|dTs\|dTs\|dGs\|dTs\|dTs\|5mCs\|dAs\|dTs\|dTp\|oGp\|oAs\|oGs\|oTs\|oA] |
| 1212 | [oTs\|oGs\|oGp\|o5mCs\|oAs\|dGs\|5mCs\|dTs\|dTs\|dGs\|dTs\|dTs\|5mCs\|dAs\|dTs\|dTs\|oGp\|oAs\|oGs\|oTs\|oA] |
| 1213 | [oTs\|oGs\|oGp\|o5mCs\|oAs\|dGs\|5mCs\|dTs\|dTs\|dGs\|dTs\|dTs\|5mCs\|dAs\|dTs\|dTp\|oGs\|oAs\|oGs\|oTs\|oA] |
| 1214 | [oTs\|oGs\|oGs\|o5mCp\|oAs\|dGs\|5mCs\|dTs\|dTs\|dGs\|dTs\|dTs\|5mCs\|dAs\|dTs\|dTs\|oGp\|oAs\|oGs\|oTs\|oA] |
| 1215 | [oTs\|oGs\|oGs\|o5mCp\|oAs\|dGs\|5mCs\|dTs\|dTs\|dGs\|dTs\|dTs\|5mCs\|dAs\|dTs\|dTp\|oGs\|oAs\|oGs\|oTs\|oA] |
| 1216 | [oTs\|oGs\|oGp\|o5mCs\|oAs\|dGs\|5mCs\|dTs\|dTs\|dGs\|dTs\|dTs\|5mCs\|dAs\|dTs\|dTp\|oGp\|oAs\|oGs\|oTs\|oA] |
| 1217 | [oTs\|oGs\|oGs\|o5mCp\|oAs\|dGs\|5mCs\|dTs\|dTs\|dGs\|dTs\|dTs\|5mCs\|dAs\|dTs\|dTp\|oGp\|oAs\|oGs\|oTs\|oA] |
| 1218 | [oTs\|oGs\|oGp\|o5mCp\|oAs\|dGs\|5mCs\|dTs\|dTs\|dGs\|dTs\|dTs\|5mCs\|dAs\|dTs\|dTs\|oGp\|oAs\|oGs\|oTs\|oA] |
| 1219 | [oTs\|oGs\|oGp\|o5mCp\|oAs\|dGs\|5mCs\|dTs\|dTs\|dGs\|dTs\|dTs\|5mCs\|dAs\|dTs\|dTp\|oGs\|oAs\|oGs\|oTs\|oA] |
| 1220 | [oTs\|oGs\|oGp\|o5mCp\|oAs\|dGs\|5mCs\|dTs\|dTs\|dGs\|dTs\|dTs\|5mCs\|dAs\|dTs\|dTp\|oGp\|oAs\|oGs\|oTs\|oA] |
| 1221 | [oTs\|oGs\|oGs\|o5mCs\|oAs\|dGs\|5mCs\|dTs\|dTs\|dGs\|dTs\|dTs\|5mCs\|dAs\|dTs\|dTs\|dGs\|oAs\|oGs\|oTs\|oAs\|oT] |
| 1222 | [oTs\|oGs\|oGp\|o5mCs\|oAs\|dGs\|5mCs\|dTs\|dTs\|dGs\|dTs\|dTs\|5mCs\|dAs\|dTs\|dTs\|dGs\|oAs\|oGs\|oTs\|oAs\|oT] |
| 1223 | [oTs\|oGs\|oGs\|o5mCp\|oAs\|dGs\|5mCs\|dTs\|dTs\|dGs\|dTs\|dTs\|5mCs\|dAs\|dTs\|dTs\|dGs\|oAs\|oGs\|oTs\|oAs\|oT] |
| 1224 | [oTs\|oGs\|oGp\|o5mCp\|oAs\|dGs\|5mCs\|dTs\|dTs\|dGs\|dTs\|dTs\|5mCs\|dAs\|dTs\|dTs\|dGs\|oAs\|oGs\|oTs\|oAs\|oT] |
| 1225 | [oTs\|oGs\|oGs\|o5mCs\|oAs\|dGs\|5mCs\|dTs\|dTs\|dGs\|dTs\|dTs\|5mCs\|dAs\|dTs\|dTs\|dGp\|oAs\|oGs\|oTs\|oAs\|oT] |
| 1226 | [oTs\|oGs\|oGs\|o5mCs\|oAs\|dGs\|5mCs\|dTs\|dTs\|dGs\|dTs\|dTs\|5mCs\|dAs\|dTs\|dTp\|dGs\|oAs\|oGs\|oTs\|oAs\|oT] |
| 1227 | [oTs\|oGs\|oGs\|o5mCs\|oAs\|dGs\|5mCs\|dTs\|dTs\|dGs\|dTs\|dTs\|5mCs\|dAs\|dTs\|dTp\|dGp\|oAs\|oGs\|oTs\|oAs\|oT] |
| 1228 | [oTs\|oGs\|oGp\|o5mCs\|oAs\|dGs\|5mCs\|dTs\|dTs\|dGs\|dTs\|dTs\|5mCs\|dAs\|dTs\|dTs\|dGp\|oAs\|oGs\|oTs\|oAs\|oT] |
| 1229 | [oTs\|oGs\|oGp\|o5mCs\|oAs\|dGs\|5mCs\|dTs\|dTs\|dGs\|dTs\|dTs\|5mCs\|dAs\|dTs\|dTp\|dGs\|oAs\|oGs\|oTs\|oAs\|oT] |
| 1230 | [oTs\|oGs\|oGs\|o5mCp\|oAs\|dGs\|5mCs\|dTs\|dTs\|dGs\|dTs\|dTs\|5mCs\|dAs\|dTs\|dTs\|dGp\|oAs\|oGs\|oTs\|oAs\|oT] |
| 1231 | [oTs\|oGs\|oGs\|o5mCp\|oAs\|dGs\|5mCs\|dTs\|dTs\|dGs\|dTs\|dTs\|5mCs\|dAs\|dTs\|dTp\|dGs\|oAs\|oGs\|oTs\|oAs\|oT] |
| 1232 | [oTs\|oGs\|oGp\|o5mCs\|oAs\|dGs\|5mCs\|dTs\|dTs\|dGs\|dTs\|dTs\|5mCs\|dAs\|dTs\|dTp\|dGp\|oAs\|oGs\|oTs\|oAs\|oT] |
| 1233 | [oTs\|oGs\|oGs\|o5mCp\|oAs\|dGs\|5mCs\|dTs\|dTs\|dGs\|dTs\|dTs\|5mCs\|dAs\|dTs\|dTp\|dGp\|oAs\|oGs\|oTs\|oAs\|oT] |
| 1234 | [oTs\|oGs\|oGp\|o5mCp\|oAs\|dGs\|5mCs\|dTs\|dTs\|dGs\|dTs\|dTs\|5mCs\|dAs\|dTs\|dTs\|dGp\|oAs\|oGs\|oTs\|oAs\|oT] |
| 1235 | [oTs\|oGs\|oGp\|o5mCp\|oAs\|dGs\|5mCs\|dTs\|dTs\|dGs\|dTs\|dTs\|5mCs\|dAs\|dTs\|dTp\|dGs\|oAs\|oGs\|oTs\|oAs\|oT] |
| 1236 | [oTs\|oGs\|oGp\|o5mCp\|oAs\|dGs\|5mCs\|dTs\|dTs\|dGs\|dTs\|dTs\|5mCs\|dAs\|dTs\|dTp\|dGp\|oAs\|oGs\|oTs\|oAs\|oT] |
| 1237 | [o5mCs\|LTs\|oTs\|oTs\|oGs\|oGs\|o5mCs\|oAs\|dGs\|5mCs\|dTs\|dTs\|dGs\|dTs\|dTs\|5mCs\|dAs\|dTs\|oTs\|oG] |
| 1238 | [o5mCs\|oTs\|LTs\|oTs\|oGs\|oGs\|o5mCs\|oAs\|dGs\|5mCs\|dTs\|dTs\|dGs\|dTs\|dTs\|5mCs\|dAs\|dTs\|oTs\|oG] |
| 1239 | [o5mCs\|oTs\|oTs\|LTs\|oGs\|oGs\|o5mCs\|oAs\|dGs\|5mCs\|dTs\|dTs\|dGs\|dTs\|dTs\|5mCs\|dAs\|dTs\|oTs\|oG] |
| 1240 | [o5mCs\|oTs\|oTs\|oTs\|LGs\|oGs\|o5mCs\|oAs\|dGs\|5mCs\|dTs\|dTs\|dGs\|dTs\|dTs\|5mCs\|dAs\|dTs\|oTs\|oG] |
| 1241 | [o5mCs\|oTs\|oTs\|oTs\|oGs\|LGs\|o5mCs\|oAs\|dGs\|5mCs\|dTs\|dTs\|dGs\|dTs\|dTs\|5mCs\|dAs\|dTs\|oTs\|oG] |
| 1242 | [o5mCs\|oTs\|oTs\|oTs\|oGs\|oGs\|L5mCs\|oAs\|dGs\|5mCs\|dTs\|dTs\|dGs\|dTs\|dTs\|5mCs\|dAs\|dTs\|oTs\|oG] |
| 1243 | [o5mCs\|oTs\|dTs\|dTs\|dGs\|dGs\|5mCs\|dAs\|dGs\|5mCs\|dTs\|dTs\|oGs\|oTs\|oTs\|o5mCs\|oAs\|oTs\|LTs\|oG] |
| 1244 | [o5mCs\|oTs\|dTs\|dTs\|dGs\|dGs\|5mCs\|dAs\|dGs\|5mCs\|dTs\|dTs\|oGs\|oTs\|oTs\|o5mCs\|oAs\|LTs\|oTs\|oG] |
| 1245 | [o5mCs\|oTs\|dTs\|dTs\|dGs\|dGs\|5mCs\|dAs\|dGs\|5mCs\|dTs\|dTs\|oGs\|oTs\|oTs\|o5mCs\|LAs\|oTs\|oTs\|oG] |
| 1246 | [o5mCs\|oTs\|dTs\|dTs\|dGs\|dGs\|5mCs\|dAs\|dGs\|5mCs\|dTs\|dTs\|oGs\|oTs\|oTs\|L5mCs\|oAs\|oTs\|oTs\|oG] |
| 1247 | [o5mCs\|oTs\|dTs\|dTs\|dGs\|dGs\|5mCs\|dAs\|dGs\|5mCs\|dTs\|dTs\|oGs\|oTs\|LTs\|o5mCs\|oAs\|oTs\|oTs\|oG] |
| 1248 | [o5mCs\|oTs\|dTs\|dTs\|dGs\|dGs\|5mCs\|dAs\|dGs\|5mCs\|dTs\|dTs\|oGs\|LTs\|oTs\|o5mCs\|oAs\|oTs\|oTs\|oG] |
| 1249 | [o5mCs\|LTs\|oTs\|oTs\|oGs\|oGs\|o5mCs\|dAs\|dGs\|5mCs\|dTs\|dTs\|dGs\|dTs\|dTs\|5mCs\|dAs\|oTs\|oTs\|oG] |
| 1250 | [o5mCs\|oTs\|LTs\|oTs\|oGs\|oGs\|o5mCs\|dAs\|dGs\|5mCs\|dTs\|dTs\|dGs\|dTs\|dTs\|5mCs\|dAs\|oTs\|oTs\|oG] |
| 1251 | [o5mCs\|oTs\|oTs\|LTs\|oGs\|oGs\|o5mCs\|dAs\|dGs\|5mCs\|dTs\|dTs\|dGs\|dTs\|dTs\|5mCs\|dAs\|oTs\|oTs\|oG] |
| 1252 | [o5mCs\|oTs\|oTs\|oTs\|LGs\|oGs\|o5mCs\|dAs\|dGs\|5mCs\|dTs\|dTs\|dGs\|dTs\|dTs\|5mCs\|dAs\|oTs\|oTs\|oG] |
| 1253 | [o5mCs\|oTs\|oTs\|oTs\|oGs\|LGs\|o5mCs\|dAs\|dGs\|5mCs\|dTs\|dTs\|dGs\|dTs\|dTs\|5mCs\|dAs\|oTs\|oTs\|oG] |
| 1254 | [o5mCs\|oTs\|oTs\|dTs\|dGs\|dGs\|5mCs\|dAs\|dGs\|5mCs\|dTs\|dTs\|dGs\|oTs\|oTs\|o5mCs\|oAs\|oTs\|LTs\|oG] |
| 1255 | [o5mCs\|oTs\|oTs\|dTs\|dGs\|dGs\|5mCs\|dAs\|dGs\|5mCs\|dTs\|dTs\|dGs\|oTs\|oTs\|o5mCs\|oAs\|LTs\|oTs\|oG] |
| 1256 | [o5mCs\|oTs\|oTs\|dTs\|dGs\|dGs\|5mCs\|dAs\|dGs\|5mCs\|dTs\|dTs\|dGs\|oTs\|oTs\|o5mCs\|LAs\|oTs\|oTs\|oG] |
| 1257 | [o5mCs\|oTs\|oTs\|dTs\|dGs\|dGs\|5mCs\|dAs\|dGs\|5mCs\|dTs\|dTs\|dGs\|oTs\|oTs\|L5mCs\|oAs\|oTs\|oTs\|oG] |
| 1258 | [o5mCs\|oTs\|oTs\|dTs\|dGs\|dGs\|5mCs\|dAs\|dGs\|5mCs\|dTs\|dTs\|dGs\|oTs\|LTs\|o5mCs\|oAs\|oTs\|oTs\|oG] |
| 1259 | [o5mCs\|LTs\|oTs\|oTs\|oGs\|oGs\|o5mCs\|dAs\|dGs\|5mCs\|dTs\|dTs\|dGs\|dTs\|dTs\|5mCs\|dAs\|oTs\|oT] |
| 1260 | [o5mCs\|oTs\|LTs\|oTs\|oGs\|oGs\|o5mCs\|dAs\|dGs\|5mCs\|dTs\|dTs\|dGs\|dTs\|dTs\|5mCs\|dAs\|oTs\|oT] |
| 1261 | [o5mCs\|oTs\|oTs\|LTs\|oGs\|oGs\|o5mCs\|dAs\|dGs\|5mCs\|dTs\|dTs\|dGs\|dTs\|dTs\|5mCs\|dAs\|oTs\|oT] |
| 1262 | [o5mCs\|oTs\|oTs\|oTs\|LGs\|oGs\|o5mCs\|dAs\|dGs\|5mCs\|dTs\|dTs\|dGs\|dTs\|dTs\|5mCs\|dAs\|oTs\|oT] |
| 1263 | [o5mCs\|oTs\|oTs\|oTs\|oGs\|LGs\|o5mCs\|dAs\|dGs\|5mCs\|dTs\|dTs\|dGs\|dTs\|dTs\|5mCs\|dAs\|oTs\|oT] |
| 1264 | [oTs\|oTs\|dTs\|dGs\|dGs\|5mCs\|dAs\|dGs\|5mCs\|dTs\|dTs\|dGs\|oTs\|oTs\|o5mCs\|oAs\|oTs\|LTs\|oG] |
| 1265 | [oTs\|oTs\|dTs\|dGs\|dGs\|5mCs\|dAs\|dGs\|5mCs\|dTs\|dTs\|dGs\|oTs\|oTs\|o5mCs\|oAs\|LTs\|oTs\|oG] |
| 1266 | [oTs\|oTs\|dTs\|dGs\|dGs\|5mCs\|dAs\|dGs\|5mCs\|dTs\|dTs\|dGs\|oTs\|oTs\|o5mCs\|LAs\|oTs\|oTs\|oG] |
| 1267 | [oTs\|oTs\|dTs\|dGs\|dGs\|5mCs\|dAs\|dGs\|5mCs\|dTs\|dTs\|dGs\|oTs\|oTs\|L5mCs\|oAs\|oTs\|oTs\|oG] |
| 1268 | [oTs\|oTs\|dTs\|dGs\|dGs\|5mCs\|dAs\|dGs\|5mCs\|dTs\|dTs\|dGs\|oTs\|LTs\|o5mCs\|oAs\|oTs\|oTs\|oG] |
| 1269 | [o5mCs\|LTs\|oTs\|oTs\|oGs\|oGs\|5mCs\|dAs\|dGs\|5mCs\|dTs\|dTs\|dGs\|dTs\|dTs\|5mCs\|oAs\|oTs\|oTs\|oG] |
| 1270 | [o5mCs\|oTs\|LTs\|oTs\|oGs\|oGs\|5mCs\|dAs\|dGs\|5mCs\|dTs\|dTs\|dGs\|dTs\|dTs\|5mCs\|oAs\|oTs\|oTs\|oG] |
| 1271 | [o5mCs\|oTs\|oTs\|LTs\|oGs\|oGs\|5mCs\|dAs\|dGs\|5mCs\|dTs\|dTs\|dGs\|dTs\|dTs\|5mCs\|oAs\|oTs\|oTs\|oG] |
| 1272 | [o5mCs\|oTs\|oTs\|oTs\|LGs\|oGs\|5mCs\|dAs\|dGs\|5mCs\|dTs\|dTs\|dGs\|dTs\|dTs\|5mCs\|oAs\|oTs\|oTs\|oG] |
| 1273 | [o5mCs\|oTs\|oTs\|oTs\|dGs\|dGs\|5mCs\|dAs\|dGs\|5mCs\|dTs\|dTs\|dGs\|dTs\|oTs\|o5mCs\|oAs\|oTs\|LTs\|oG] |
| 1274 | [o5mCs\|oTs\|oTs\|oTs\|dGs\|dGs\|5mCs\|dAs\|dGs\|5mCs\|dTs\|dTs\|dGs\|dTs\|oTs\|o5mCs\|oAs\|LTs\|oTs\|oG] |
| 1275 | [o5mCs\|oTs\|oTs\|oTs\|dGs\|dGs\|5mCs\|dAs\|dGs\|5mCs\|dTs\|dTs\|dGs\|dTs\|oTs\|o5mCs\|LAs\|oTs\|oTs\|oG] |
| 1276 | [o5mCs\|oTs\|oTs\|oTs\|dGs\|dGs\|5mCs\|dAs\|dGs\|5mCs\|dTs\|dTs\|dGs\|dTs\|oTs\|L5mCs\|oAs\|oTs\|oTs\|oG] |
| 1277 | [o5mCs\|LTs\|oTs\|oTs\|oGs\|oGs\|5mCs\|dAs\|dGs\|5mCs\|dTs\|dTs\|dGs\|dTs\|dTs\|5mCs\|oAs\|oTs\|oT] |
| 1278 | [o5mCs\|oTs\|LTs\|oTs\|oGs\|oGs\|5mCs\|dAs\|dGs\|5mCs\|dTs\|dTs\|dGs\|dTs\|dTs\|5mCs\|oAs\|oTs\|oT] |
| 1279 | [o5mCs\|oTs\|oTs\|LTs\|oGs\|oGs\|5mCs\|dAs\|dGs\|5mCs\|dTs\|dTs\|dGs\|dTs\|dTs\|5mCs\|oAs\|oTs\|oT] |
| 1280 | [o5mCs\|oTs\|oTs\|oTs\|LGs\|oGs\|5mCs\|dAs\|dGs\|5mCs\|dTs\|dTs\|dGs\|dTs\|dTs\|5mCs\|oAs\|oTs\|oT] |
| 1281 | [o5mCs\|oTs\|oTs\|dTs\|dGs\|dGs\|5mCs\|dAs\|dGs\|5mCs\|dTs\|dTs\|dGs\|dTs\|oTs\|o5mCs\|oAs\|oTs\|LTs\|oG] |
| 1282 | [o5mCs\|oTs\|oTs\|dTs\|dGs\|dGs\|5mCs\|dAs\|dGs\|5mCs\|dTs\|dTs\|dGs\|dTs\|oTs\|o5mCs\|oAs\|LTs\|oTs\|oG] |
| 1283 | [o5mCs\|oTs\|oTs\|dTs\|dGs\|dGs\|5mCs\|dAs\|dGs\|5mCs\|dTs\|dTs\|dGs\|dTs\|oTs\|o5mCs\|LAs\|oTs\|oTs\|oG] |
| 1284 | [o5mCs\|LTs\|oTs\|oTs\|oGs\|oGs\|5mCs\|dAs\|dGs\|5mCs\|dTs\|dTs\|dGs\|dTs\|dTs\|5mCs\|oAs\|oT] |
| 1285 | [o5mCs\|oTs\|LTs\|oTs\|oGs\|oGs\|5mCs\|dAs\|dGs\|5mCs\|dTs\|dTs\|dGs\|dTs\|dTs\|5mCs\|oAs\|oT] |
| 1286 | [o5mCs\|oTs\|oTs\|LTs\|oGs\|oGs\|5mCs\|dAs\|dGs\|5mCs\|dTs\|dTs\|dGs\|dTs\|dTs\|5mCs\|oAs\|oT] |
| 1287 | [o5mCs\|oTs\|oTs\|oTs\|LGs\|oGs\|5mCs\|dAs\|dGs\|5mCs\|dTs\|dTs\|dGs\|dTs\|dTs\|5mCs\|oAs\|oT] |
| 1288 | [oTs\|oTs\|dGs\|dGs\|5mCs\|dAs\|dGs\|5mCs\|dTs\|dTs\|dGs\|dTs\|oTs\|o5mCs\|oAs\|oTs\|LTs\|oG] |
| 1289 | [oTs\|oTs\|dGs\|dGs\|5mCs\|dAs\|dGs\|5mCs\|dTs\|dTs\|dGs\|dTs\|oTs\|o5mCs\|oAs\|LTs\|oTs\|oG] |
| 1290 | [oTs\|oTs\|dGs\|dGs\|5mCs\|dAs\|dGs\|5mCs\|dTs\|dTs\|dGs\|dTs\|oTs\|o5mCs\|LAs\|oTs\|oTs\|oG] |
| 1291 | [oTs\|oTs\|dGs\|dGs\|5mCs\|dAs\|dGs\|5mCs\|dTs\|dTs\|dGs\|dTs\|oTs\|L5mCs\|oAs\|oTs\|oTs\|oG] |
| 1292 | [o5mCs\|LTs\|oTs\|oTs\|oGs\|dGs\|5mCs\|dAs\|dGs\|5mCs\|dTs\|dTs\|dGs\|dTs\|dTs\|o5mCs\|oAs\|oTs\|oTs\|oG] |
| 1293 | [o5mCs\|oTs\|LTs\|oTs\|oGs\|dGs\|5mCs\|dAs\|dGs\|5mCs\|dTs\|dTs\|dGs\|dTs\|dTs\|o5mCs\|oAs\|oTs\|oTs\|oG] |
| 1294 | [o5mCs\|oTs\|oTs\|LTs\|oGs\|dGs\|5mCs\|dAs\|dGs\|5mCs\|dTs\|dTs\|dGs\|dTs\|dTs\|o5mCs\|oAs\|oTs\|oTs\|oG] |
| 1295 | [o5mCs\|oTs\|oTs\|oTs\|oGs\|dGs\|5mCs\|dAs\|dGs\|5mCs\|dTs\|dTs\|dGs\|dTs\|dTs\|o5mCs\|oAs\|oTs\|LTs\|oG] |
| 1296 | [o5mCs\|oTs\|oTs\|oTs\|oGs\|dGs\|5mCs\|dAs\|dGs\|5mCs\|dTs\|dTs\|dGs\|dTs\|dTs\|o5mCs\|oAs\|LTs\|oTs\|oG] |
| 1297 | [o5mCs\|oTs\|oTs\|oTs\|oGs\|dGs\|5mCs\|dAs\|dGs\|5mCs\|dTs\|dTs\|dGs\|dTs\|dTs\|o5mCs\|LAs\|oTs\|oTs\|oG] |
| 1298 | [o5mCs\|LTs\|oTs\|oTs\|oGs\|dGs\|5mCs\|dAs\|dGs\|5mCs\|dTs\|dTs\|dGs\|dTs\|dTs\|o5mCs\|oAs\|oTs\|oT] |
| 1299 | [o5mCs\|oTs\|LTs\|oTs\|oGs\|dGs\|5mCs\|dAs\|dGs\|5mCs\|dTs\|dTs\|dGs\|dTs\|dTs\|o5mCs\|oAs\|oTs\|oT] |
| 1300 | [o5mCs\|oTs\|oTs\|LTs\|oGs\|dGs\|5mCs\|dAs\|dGs\|5mCs\|dTs\|dTs\|dGs\|dTs\|dTs\|o5mCs\|oAs\|oTs\|oT] |
| 1301 | [oTs\|oTs\|oTs\|oGs\|dGs\|5mCs\|dAs\|dGs\|5mCs\|dTs\|dTs\|dGs\|dTs\|dTs\|o5mCs\|oAs\|oTs\|LTs\|oG] |
| 1302 | [oTs\|oTs\|oTs\|oGs\|dGs\|5mCs\|dAs\|dGs\|5mCs\|dTs\|dTs\|dGs\|dTs\|dTs\|o5mCs\|oAs\|LTs\|oTs\|oG] |
| 1303 | [oTs\|oTs\|oTs\|oGs\|dGs\|5mCs\|dAs\|dGs\|5mCs\|dTs\|dTs\|dGs\|dTs\|dTs\|o5mCs\|LAs\|oTs\|oTs\|oG] |
| 1304 | [o5mCs\|LTs\|oTs\|oTs\|oGs\|dGs\|5mCs\|dAs\|dGs\|5mCs\|dTs\|dTs\|dGs\|dTs\|dTs\|o5mCs\|oAs\|oT] |
| 1305 | [o5mCs\|oTs\|LTs\|oTs\|oGs\|dGs\|5mCs\|dAs\|dGs\|5mCs\|dTs\|dTs\|dGs\|dTs\|dTs\|o5mCs\|oAs\|oT] |
| 1306 | [o5mCs\|oTs\|oTs\|LTs\|oGs\|dGs\|5mCs\|dAs\|dGs\|5mCs\|dTs\|dTs\|dGs\|dTs\|dTs\|o5mCs\|oAs\|oT] |
| 1307 | [oTs\|oTs\|oGs\|dGs\|5mCs\|dAs\|dGs\|5mCs\|dTs\|dTs\|dGs\|dTs\|dTs\|o5mCs\|oAs\|oTs\|LTs\|oG] |
| 1308 | [oTs\|oTs\|oGs\|dGs\|5mCs\|dAs\|dGs\|5mCs\|dTs\|dTs\|dGs\|dTs\|dTs\|o5mCs\|oAs\|LTs\|oTs\|oG] |
| 1309 | [oTs\|oTs\|oGs\|dGs\|5mCs\|dAs\|dGs\|5mCs\|dTs\|dTs\|dGs\|dTs\|dTs\|o5mCs\|LAs\|oTs\|oTs\|oG] |
| 1310 | [o5mCs\|LTs\|oTs\|oTs\|oGs\|dGs\|5mCs\|dAs\|dGs\|5mCs\|dTs\|dTs\|dGs\|dTs\|dTs\|o5mCs\|oA] |
| 1311 | [o5mCs\|oTs\|LTs\|oTs\|oGs\|dGs\|5mCs\|dAs\|dGs\|5mCs\|dTs\|dTs\|dGs\|dTs\|dTs\|o5mCs\|oA] |
| 1312 | [o5mCs\|oTs\|oTs\|LTs\|oGs\|dGs\|5mCs\|dAs\|dGs\|5mCs\|dTs\|dTs\|dGs\|dTs\|dTs\|o5mCs\|oA] |
| 1313 | [oTs\|oGs\|dGs\|5mCs\|dAs\|dGs\|5mCs\|dTs\|dTs\|dGs\|dTs\|dTs\|o5mCs\|oAs\|oTs\|LTs\|oG] |
| 1314 | [oTs\|oGs\|dGs\|5mCs\|dAs\|dGs\|5mCs\|dTs\|dTs\|dGs\|dTs\|dTs\|o5mCs\|oAs\|LTs\|oTs\|oG] |
| 1315 | [oTs\|oGs\|dGs\|5mCs\|dAs\|dGs\|5mCs\|dTs\|dTs\|dGs\|dTs\|dTs\|o5mCs\|LAs\|oTs\|oTs\|oG] |
| 1316 | [oTs\|LTs\|oTs\|oGs\|dGs\|5mCs\|dAs\|dGs\|5mCs\|dTs\|dTs\|dGs\|dTs\|dTs\|o5mCs\|oAs\|oTs\|oTs\|oG] |
| 1317 | [oTs\|oTs\|LTs\|oGs\|dGs\|5mCs\|dAs\|dGs\|5mCs\|dTs\|dTs\|dGs\|dTs\|dTs\|o5mCs\|oAs\|oTs\|oTs\|oG] |
| 1318 | [o5mCs\|oTs\|oTs\|oTs\|oGs\|dGs\|5mCs\|dAs\|dGs\|5mCs\|dTs\|dTs\|dGs\|dTs\|dTs\|o5mCs\|oAs\|LTs\|oT] |
| 1319 | [o5mCs\|oTs\|oTs\|oTs\|oGs\|dGs\|5mCs\|dAs\|dGs\|5mCs\|dTs\|dTs\|dGs\|dTs\|dTs\|o5mCs\|LAs\|oTs\|oT] |
| 1320 | [oTs\|LTs\|oTs\|oGs\|dGs\|5mCs\|dAs\|dGs\|5mCs\|dTs\|dTs\|dGs\|dTs\|dTs\|o5mCs\|oAs\|oTs\|oT] |
| 1321 | [oTs\|oTs\|LTs\|oGs\|dGs\|5mCs\|dAs\|dGs\|5mCs\|dTs\|dTs\|dGs\|dTs\|dTs\|o5mCs\|oAs\|oTs\|oT] |
| 1322 | [oTs\|oTs\|oTs\|oGs\|dGs\|5mCs\|dAs\|dGs\|5mCs\|dTs\|dTs\|dGs\|dTs\|dTs\|o5mCs\|oAs\|LTs\|oT] |
| 1323 | [oTs\|oTs\|oTs\|oGs\|dGs\|5mCs\|dAs\|dGs\|5mCs\|dTs\|dTs\|dGs\|dTs\|dTs\|o5mCs\|LAs\|oTs\|oT] |
| 1324 | [oTs\|LTs\|oTs\|oGs\|dGs\|5mCs\|dAs\|dGs\|5mCs\|dTs\|dTs\|dGs\|dTs\|dTs\|o5mCs\|oAs\|oT] |
| 1325 | [oTs\|oTs\|LTs\|oGs\|dGs\|5mCs\|dAs\|dGs\|5mCs\|dTs\|dTs\|dGs\|dTs\|dTs\|o5mCs\|oAs\|oT] |
| 1326 | [oTs\|oTs\|oTs\|oGs\|dGs\|5mCs\|dAs\|dGs\|5mCs\|dTs\|dTs\|dGs\|dTs\|dTs\|o5mCs\|LAs\|oT] |
| 1327 | [o5mCs\|oTs\|oTs\|oTs\|oGs\|oGs\|o5mCs\|oAs\|dGs\|5mCs\|dTs\|dTs\|dGs\|dTs\|dTs\|5mCs\|dAs\|dTs\|oTs\|oG] |
| 1328 | [o5mCs\|oTs\|dTs\|dTs\|dGs\|dGs\|5mCs\|dAs\|dGs\|5mCs\|dTs\|dTs\|oGs\|oTs\|oTs\|o5mCs\|oAs\|oTs\|oTs\|oG] |
| 1329 | [o5mCs\|oTs\|oTs\|oTs\|oGs\|oGs\|o5mCs\|dAs\|dGs\|5mCs\|dTs\|dTs\|dGs\|dTs\|dTs\|5mCs\|dAs\|oTs\|oTs\|oG] |
| 1330 | [o5mCs\|oTs\|oTs\|dTs\|dGs\|dGs\|5mCs\|dAs\|dGs\|5mCs\|dTs\|dTs\|dGs\|oTs\|oTs\|o5mCs\|oAs\|oTs\|oTs\|oG] |
| 1331 | [o5mCs\|oTs\|oTs\|oTs\|oGs\|oGs\|o5mCs\|dAs\|dGs\|5mCs\|dTs\|dTs\|dGs\|dTs\|dTs\|5mCs\|dAs\|oTs\|oT] |
| 1332 | [oTs\|oTs\|dTs\|dGs\|dGs\|5mCs\|dAs\|dGs\|5mCs\|dTs\|dTs\|dGs\|oTs\|oTs\|o5mCs\|oAs\|oTs\|oTs\|oG] |
| 1333 | [o5mCs\|oTs\|oTs\|oTs\|oGs\|oGs\|5mCs\|dAs\|dGs\|5mCs\|dTs\|dTs\|dGs\|dTs\|dTs\|5mCs\|oAs\|oTs\|oTs\|oG] |
| 1334 | [o5mCs\|oTs\|oTs\|oTs\|dGs\|dGs\|5mCs\|dAs\|dGs\|5mCs\|dTs\|dTs\|dGs\|dTs\|oTs\|o5mCs\|oAs\|oTs\|oTs\|oG] |
| 1335 | [o5mCs\|oTs\|oTs\|oTs\|oGs\|oGs\|5mCs\|dAs\|dGs\|5mCs\|dTs\|dTs\|dGs\|dTs\|dTs\|5mCs\|oAs\|oTs\|oT] |
| 1336 | [o5mCs\|oTs\|oTs\|dTs\|dGs\|dGs\|5mCs\|dAs\|dGs\|5mCs\|dTs\|dTs\|dGs\|dTs\|oTs\|o5mCs\|oAs\|oTs\|oTs\|oG] |
| 1337 | [o5mCs\|oTs\|oTs\|oTs\|oGs\|oGs\|5mCs\|dAs\|dGs\|5mCs\|dTs\|dTs\|dGs\|dTs\|dTs\|5mCs\|oAs\|oT] |
| 1338 | [oTs\|oTs\|dGs\|dGs\|5mCs\|dAs\|dGs\|5mCs\|dTs\|dTs\|dGs\|dTs\|oTs\|o5mCs\|oAs\|oTs\|oTs\|oG] |
| 1339 | [o5mCs\|oTs\|oTs\|oTs\|oGs\|dGs\|5mCs\|dAs\|dGs\|5mCs\|dTs\|dTs\|dGs\|dTs\|dTs\|o5mCs\|oAs\|oTs\|oTs\|oG] |
| 1340 | [o5mCs\|oTs\|oTs\|oTs\|oGs\|dGs\|5mCs\|dAs\|dGs\|5mCs\|dTs\|dTs\|dGs\|dTs\|dTs\|o5mCs\|oAs\|oTs\|oT] |
| 1341 | [o5mCs\|oTs\|oTs\|oTs\|oGs\|dGs\|5mCs\|dAs\|dGs\|5mCs\|dTs\|dTs\|dGs\|dTs\|dTs\|o5mCs\|oAs\|oT] |
| 1342 | [oTs\|oTs\|oGs\|dGs\|5mCs\|dAs\|dGs\|5mCs\|dTs\|dTs\|dGs\|dTs\|dTs\|o5mCs\|oAs\|oTs\|oTs\|oG] |
| 1343 | [o5mCs\|oTs\|oTs\|oTs\|oGs\|dGs\|5mCs\|dAs\|dGs\|5mCs\|dTs\|dTs\|dGs\|dTs\|dTs\|o5mCs\|oA] |
| 1344 | [oTs\|oGs\|dGs\|5mCs\|dAs\|dGs\|5mCs\|dTs\|dTs\|dGs\|dTs\|dTs\|o5mCs\|oAs\|oTs\|oTs\|oG] |
| 1345 | [oTs\|oTs\|oTs\|oGs\|dGs\|5mCs\|dAs\|dGs\|5mCs\|dTs\|dTs\|dGs\|dTs\|dTs\|o5mCs\|oAs\|oTs\|oTs\|oG] |
| 1346 | [oTs\|oTs\|oTs\|oGs\|dGs\|5mCs\|dAs\|dGs\|5mCs\|dTs\|dTs\|dGs\|dTs\|dTs\|o5mCs\|oAs\|oTs\|oT] |
| 1347 | [oTs\|oTs\|oTs\|oGs\|dGs\|5mCs\|dAs\|dGs\|5mCs\|dTs\|dTs\|dGs\|dTs\|dTs\|o5mCs\|oAs\|oT] |
| 1348 | [o5mCs\|oTs\|oTp\|oTs\|oGs\|dGs\|5mCs\|dAs\|dGs\|5mCs\|dTs\|dTs\|dGs\|dTs\|dTs\|o5mCs\|oAs\|oTs\|oTs\|oG] |
| 1349 | [o5mCs\|oTs\|oTs\|oTp\|oGs\|dGs\|5mCs\|dAs\|dGs\|5mCs\|dTs\|dTs\|dGs\|dTs\|dTs\|o5mCs\|oAs\|oTs\|oTs\|oG] |
| 1350 | [o5mCs\|oTs\|oTp\|oTp\|oGs\|dGs\|5mCs\|dAs\|dGs\|5mCs\|dTs\|dTs\|dGs\|dTs\|dTs\|o5mCs\|oAs\|oTs\|oTs\|oG] |
| 1351 | [o5mCs\|oTs\|oTs\|oTs\|oGs\|dGs\|5mCs\|dAs\|dGs\|5mCs\|dTs\|dTs\|dGs\|dTs\|dTs\|o5mCs\|oAp\|oTs\|oTs\|oG] |
| 1352 | [o5mCs\|oTs\|oTs\|oTs\|oGs\|dGs\|5mCs\|dAs\|dGs\|5mCs\|dTs\|dTs\|dGs\|dTs\|dTs\|o5mCp\|oAs\|oTs\|oTs\|oG] |
| 1353 | [o5mCs\|oTs\|oTs\|oTs\|oGs\|dGs\|5mCs\|dAs\|dGs\|5mCs\|dTs\|dTs\|dGs\|dTs\|dTs\|o5mCp\|oAp\|oTs\|oTs\|oG] |
| 1354 | [o5mCs\|oTs\|oTp\|oTs\|oGs\|dGs\|5mCs\|dAs\|dGs\|5mCs\|dTs\|dTs\|dGs\|dTs\|dTs\|o5mCs\|oAp\|oTs\|oTs\|oG] |
| 1355 | [o5mCs\|oTs\|oTp\|oTs\|oGs\|dGs\|5mCs\|dAs\|dGs\|5mCs\|dTs\|dTs\|dGs\|dTs\|dTs\|o5mCp\|oAs\|oTs\|oTs\|oG] |
| 1356 | [o5mCs\|oTs\|oTs\|oTp\|oGs\|dGs\|5mCs\|dAs\|dGs\|5mCs\|dTs\|dTs\|dGs\|dTs\|dTs\|o5mCs\|oAp\|oTs\|oTs\|oG] |
| 1357 | [o5mCs\|oTs\|oTs\|oTp\|oGs\|dGs\|5mCs\|dAs\|dGs\|5mCs\|dTs\|dTs\|dGs\|dTs\|dTs\|o5mCp\|oAs\|oTs\|oTs\|oG] |
| 1358 | [o5mCs\|oTs\|oTp\|oTs\|oGs\|dGs\|5mCs\|dAs\|dGs\|5mCs\|dTs\|dTs\|dGs\|dTs\|dTs\|o5mCp\|oAp\|oTs\|oTs\|oG] |
| 1359 | [o5mCs\|oTs\|oTs\|oTp\|oGs\|dGs\|5mCs\|dAs\|dGs\|5mCs\|dTs\|dTs\|dGs\|dTs\|dTs\|o5mCp\|oAp\|oTs\|oTs\|oG] |
| 1360 | [o5mCs\|oTs\|oTp\|oTp\|oGs\|dGs\|5mCs\|dAs\|dGs\|5mCs\|dTs\|dTs\|dGs\|dTs\|dTs\|o5mCs\|oAp\|oTs\|oTs\|oG] |
| 1361 | [o5mCs\|oTs\|oTp\|oTp\|oGs\|dGs\|5mCs\|dAs\|dGs\|5mCs\|dTs\|dTs\|dGs\|dTs\|dTs\|o5mCp\|oAs\|oTs\|oTs\|oG] |
| 1362 | [o5mCs\|oTs\|oTp\|oTp\|oGs\|dGs\|5mCs\|dAs\|dGs\|5mCs\|dTs\|dTs\|dGs\|dTs\|dTs\|o5mCp\|oAp\|oTs\|oTs\|oG] |
| 1363 | [o5mCs\|oTs\|oTs\|oTs\|oGs\|dGs\|5mCs\|dAs\|dGs\|5mCs\|dTs\|dTs\|dGs\|dTs\|dTs\|o5mCs\|oAs\|oTs\|oTs\|oGs\|oA] |
| 1364 | [o5mCs\|oTs\|oTp\|oTs\|oGs\|dGs\|5mCs\|dAs\|dGs\|5mCs\|dTs\|dTs\|dGs\|dTs\|dTs\|o5mCs\|oAs\|oTs\|oTs\|oGs\|oA] |
| 1365 | [o5mCs\|oTs\|oTs\|oTp\|oGs\|dGs\|5mCs\|dAs\|dGs\|5mCs\|dTs\|dTs\|dGs\|dTs\|dTs\|o5mCs\|oAs\|oTs\|oTs\|oGs\|oA] |
| 1366 | [o5mCs\|oTs\|oTp\|oTp\|oGs\|dGs\|5mCs\|dAs\|dGs\|5mCs\|dTs\|dTs\|dGs\|dTs\|dTs\|o5mCs\|oAs\|oTs\|oTs\|oGs\|oA] |
| 1367 | [o5mCs\|oTs\|oTs\|oTs\|oGs\|dGs\|5mCs\|dAs\|dGs\|5mCs\|dTs\|dTs\|dGs\|dTs\|dTs\|o5mCs\|oAp\|oTs\|oTs\|oGs\|oA] |
| 1368 | [o5mCs\|oTs\|oTs\|oTs\|oGs\|dGs\|5mCs\|dAs\|dGs\|5mCs\|dTs\|dTs\|dGs\|dTs\|dTs\|o5mCp\|oAs\|oTs\|oTs\|oGs\|oA] |
| 1369 | [o5mCs\|oTs\|oTs\|oTs\|oGs\|dGs\|5mCs\|dAs\|dGs\|5mCs\|dTs\|dTs\|dGs\|dTs\|dTs\|o5mCp\|oAp\|oTs\|oTs\|oGs\|oA] |
| 1370 | [o5mCs\|oTs\|oTp\|oTs\|oGs\|dGs\|5mCs\|dAs\|dGs\|5mCs\|dTs\|dTs\|dGs\|dTs\|dTs\|o5mCs\|oAp\|oTs\|oTs\|oGs\|oA] |
| 1371 | [o5mCs\|oTs\|oTp\|oTs\|oGs\|dGs\|5mCs\|dAs\|dGs\|5mCs\|dTs\|dTs\|dGs\|dTs\|dTs\|o5mCp\|oAs\|oTs\|oTs\|oGs\|oA] |
| 1372 | [o5mCs\|oTs\|oTs\|oTp\|oGs\|dGs\|5mCs\|dAs\|dGs\|5mCs\|dTs\|dTs\|dGs\|dTs\|dTs\|o5mCs\|oAp\|oTs\|oTs\|oGs\|oA] |
| 1373 | [o5mCs\|oTs\|oTs\|oTp\|oGs\|dGs\|5mCs\|dAs\|dGs\|5mCs\|dTs\|dTs\|dGs\|dTs\|dTs\|o5mCp\|oAs\|oTs\|oTs\|oGs\|oA] |
| 1374 | [o5mCs\|oTs\|oTp\|oTs\|oGs\|dGs\|5mCs\|dAs\|dGs\|5mCs\|dTs\|dTs\|dGs\|dTs\|dTs\|o5mCp\|oAp\|oTs\|oTs\|oGs\|oA] |
| 1375 | [o5mCs\|oTs\|oTs\|oTp\|oGs\|dGs\|5mCs\|dAs\|dGs\|5mCs\|dTs\|dTs\|dGs\|dTs\|dTs\|o5mCp\|oAp\|oTs\|oTs\|oGs\|oA] |
| 1376 | [o5mCs\|oTs\|oTp\|oTp\|oGs\|dGs\|5mCs\|dAs\|dGs\|5mCs\|dTs\|dTs\|dGs\|dTs\|dTs\|o5mCs\|oAp\|oTs\|oTs\|oGs\|oA] |
| 1377 | [o5mCs\|oTs\|oTp\|oTp\|oGs\|dGs\|5mCs\|dAs\|dGs\|5mCs\|dTs\|dTs\|dGs\|dTs\|dTs\|o5mCp\|oAs\|oTs\|oTs\|oGs\|oA] |
| 1378 | [o5mCs\|oTs\|oTp\|oTp\|oGs\|dGs\|5mCs\|dAs\|dGs\|5mCs\|dTs\|dTs\|dGs\|dTs\|dTs\|o5mCp\|oAp\|oTs\|oTs\|oGs\|oA] |
| 1379 | [o5mCs\|oTs\|oTs\|oTs\|oGs\|dGs\|5mCs\|dAs\|dGs\|5mCs\|dTs\|dTs\|dGs\|dTs\|dTs\|o5mCs\|oAs\|oTs\|oTs\|oGs\|oAs\|oG] |
| 1380 | [o5mCs\|oTs\|oTp\|oTs\|oGs\|dGs\|5mCs\|dAs\|dGs\|5mCs\|dTs\|dTs\|dGs\|dTs\|dTs\|o5mCs\|oAs\|oTs\|oTs\|oGs\|oAs\|oG] |
| 1381 | [o5mCs\|oTs\|oTs\|oTp\|oGs\|dGs\|5mCs\|dAs\|dGs\|5mCs\|dTs\|dTs\|dGs\|dTs\|dTs\|o5mCs\|oAs\|oTs\|oTs\|oGs\|oAs\|oG] |
| 1382 | [o5mCs\|oTs\|oTp\|oTp\|oGs\|dGs\|5mCs\|dAs\|dGs\|5mCs\|dTs\|dTs\|dGs\|dTs\|dTs\|o5mCs\|oAs\|oTs\|oTs\|oGs\|oAs\|oG] |
| 1383 | [o5mCs\|oTs\|oTs\|oTs\|oGs\|dGs\|5mCs\|dAs\|dGs\|5mCs\|dTs\|dTs\|dGs\|dTs\|dTs\|o5mCs\|oAp\|oTs\|oTs\|oGs\|oAs\|oG] |
| 1384 | [o5mCs\|oTs\|oTs\|oTs\|oGs\|dGs\|5mCs\|dAs\|dGs\|5mCs\|dTs\|dTs\|dGs\|dTs\|dTs\|o5mCp\|oAs\|oTs\|oTs\|oGs\|oAs\|oG] |
| 1385 | [o5mCs\|oTs\|oTs\|oTs\|oGs\|dGs\|5mCs\|dAs\|dGs\|5mCs\|dTs\|dTs\|dGs\|dTs\|dTs\|o5mCp\|oAp\|oTs\|oTs\|oGs\|oAs\|oG] |
| 1386 | [o5mCs\|oTs\|oTp\|oTs\|oGs\|dGs\|5mCs\|dAs\|dGs\|5mCs\|dTs\|dTs\|dGs\|dTs\|dTs\|o5mCs\|oAp\|oTs\|oTs\|oGs\|oAs\|oG] |
| 1387 | [o5mCs\|oTs\|oTp\|oTs\|oGs\|dGs\|5mCs\|dAs\|dGs\|5mCs\|dTs\|dTs\|dGs\|dTs\|dTs\|o5mCp\|oAs\|oTs\|oTs\|oGs\|oAs\|oG] |
| 1388 | [o5mCs\|oTs\|oTs\|oTp\|oGs\|dGs\|5mCs\|dAs\|dGs\|5mCs\|dTs\|dTs\|dGs\|dTs\|dTs\|o5mCs\|oAp\|oTs\|oTs\|oGs\|oAs\|oG] |
| 1389 | [o5mCs\|oTs\|oTs\|oTp\|oGs\|dGs\|5mCs\|dAs\|dGs\|5mCs\|dTs\|dTs\|dGs\|dTs\|dTs\|o5mCp\|oAs\|oTs\|oTs\|oGs\|oAs\|oG] |
| 1390 | [o5mCs\|oTs\|oTp\|oTs\|oGs\|dGs\|5mCs\|dAs\|dGs\|5mCs\|dTs\|dTs\|dGs\|dTs\|dTs\|o5mCp\|oAp\|oTs\|oTs\|oGs\|oAs\|oG] |
| 1391 | [o5mCs\|oTs\|oTs\|oTp\|oGs\|dGs\|5mCs\|dAs\|dGs\|5mCs\|dTs\|dTs\|dGs\|dTs\|dTs\|o5mCp\|oAp\|oTs\|oTs\|oGs\|oAs\|oG] |
| 1392 | [o5mCs\|oTs\|oTp\|oTp\|oGs\|dGs\|5mCs\|dAs\|dGs\|5mCs\|dTs\|dTs\|dGs\|dTs\|dTs\|o5mCs\|oAp\|oTs\|oTs\|oGs\|oAs\|oG] |
| 1393 | [o5mCs\|oTs\|oTp\|oTp\|oGs\|dGs\|5mCs\|dAs\|dGs\|5mCs\|dTs\|dTs\|dGs\|dTs\|dTs\|o5mCp\|oAs\|oTs\|oTs\|oGs\|oAs\|oG] |
| 1394 | [o5mCs\|oTs\|oTp\|oTp\|oGs\|dGs\|5mCs\|dAs\|dGs\|5mCs\|dTs\|dTs\|dGs\|dTs\|dTs\|o5mCp\|oAp\|oTs\|oTs\|oGs\|oAs\|oG] |
| 1395 | [o5mCs\|oTs\|oTs\|oTs\|oGs\|dGs\|5mCs\|dAs\|dGs\|5mCs\|dTs\|dTs\|dGs\|dTs\|dTs\|o5mCs\|oAs\|oTs\|oTs\|oGs\|oAs\|oGs\|oT] |
| 1396 | [o5mCs\|oTs\|oTp\|oTs\|oGs\|dGs\|5mCs\|dAs\|dGs\|5mCs\|dTs\|dTs\|dGs\|dTs\|dTs\|o5mCs\|oAs\|oTs\|oTs\|oGs\|oAs\|oGs\|oT] |
| 1397 | [o5mCs\|oTs\|oTs\|oTp\|oGs\|dGs\|5mCs\|dAs\|dGs\|5mCs\|dTs\|dTs\|dGs\|dTs\|dTs\|o5mCs\|oAs\|oTs\|oTs\|oGs\|oAs\|oGs\|oT] |
| 1398 | [o5mCs\|oTs\|oTp\|oTp\|oGs\|dGs\|5mCs\|dAs\|dGs\|5mCs\|dTs\|dTs\|dGs\|dTs\|dTs\|o5mCs\|oAs\|oTs\|oTs\|oGs\|oAs\|oGs\|oT] |
| 1399 | [o5mCs\|oTs\|oTs\|oTs\|oGs\|dGs\|5mCs\|dAs\|dGs\|5mCs\|dTs\|dTs\|dGs\|dTs\|dTs\|o5mCs\|oAp\|oTs\|oTs\|oGs\|oAs\|oGs\|oT] |
| 1400 | [o5mCs\|oTs\|oTs\|oTs\|oGs\|dGs\|5mCs\|dAs\|dGs\|5mCs\|dTs\|dTs\|dGs\|dTs\|dTs\|o5mCp\|oAs\|oTs\|oTs\|oGs\|oAs\|oGs\|oT] |
| 1401 | [o5mCs\|oTs\|oTs\|oTs\|oGs\|dGs\|5mCs\|dAs\|dGs\|5mCs\|dTs\|dTs\|dGs\|dTs\|dTs\|o5mCp\|oAp\|oTs\|oTs\|oGs\|oAs\|oGs\|oT] |
| 1402 | [o5mCs\|oTs\|oTp\|oTs\|oGs\|dGs\|5mCs\|dAs\|dGs\|5mCs\|dTs\|dTs\|dGs\|dTs\|dTs\|o5mCs\|oAp\|oTs\|oTs\|oGs\|oAs\|oGs\|oT] |
| 1403 | [o5mCs\|oTs\|oTp\|oTs\|oGs\|dGs\|5mCs\|dAs\|dGs\|5mCs\|dTs\|dTs\|dGs\|dTs\|dTs\|o5mCp\|oAs\|oTs\|oTs\|oGs\|oAs\|oGs\|oT] |
| 1404 | [o5mCs\|oTs\|oTs\|oTp\|oGs\|dGs\|5mCs\|dAs\|dGs\|5mCs\|dTs\|dTs\|dGs\|dTs\|dTs\|o5mCs\|oAp\|oTs\|oTs\|oGs\|oAs\|oGs\|oT] |
| 1405 | [o5mCs\|oTs\|oTs\|oTp\|oGs\|dGs\|5mCs\|dAs\|dGs\|5mCs\|dTs\|dTs\|dGs\|dTs\|dTs\|o5mCp\|oAs\|oTs\|oTs\|oGs\|oAs\|oGs\|oT] |
| 1406 | [o5mCs\|oTs\|oTp\|oTs\|oGs\|dGs\|5mCs\|dAs\|dGs\|5mCs\|dTs\|dTs\|dGs\|dTs\|dTs\|o5mCp\|oAp\|oTs\|oTs\|oGs\|oAs\|oGs\|oT] |
| 1407 | [o5mCs\|oTs\|oTs\|oTp\|oGs\|dGs\|5mCs\|dAs\|dGs\|5mCs\|dTs\|dTs\|dGs\|dTs\|dTs\|o5mCp\|oAp\|oTs\|oTs\|oGs\|oAs\|oGs\|oT] |
| 1408 | [o5mCs\|oTs\|oTp\|oTp\|oGs\|dGs\|5mCs\|dAs\|dGs\|5mCs\|dTs\|dTs\|dGs\|dTs\|dTs\|o5mCs\|oAp\|oTs\|oTs\|oGs\|oAs\|oGs\|oT] |
| 1409 | [o5mCs\|oTs\|oTp\|oTp\|oGs\|dGs\|5mCs\|dAs\|dGs\|5mCs\|dTs\|dTs\|dGs\|dTs\|dTs\|o5mCp\|oAs\|oTs\|oTs\|oGs\|oAs\|oGs\|oT] |
| 1410 | [o5mCs\|oTs\|oTp\|oTp\|oGs\|dGs\|5mCs\|dAs\|dGs\|5mCs\|dTs\|dTs\|dGs\|dTs\|dTs\|o5mCp\|oAp\|oTs\|oTs\|oGs\|oAs\|oGs\|oT] |
| 1411 | [o5mCs\|oTs\|oTs\|oTs\|oGs\|dGs\|5mCs\|dAs\|dGs\|5mCs\|dTs\|dTs\|dGs\|dTs\|dTs\|5mCs\|oAs\|oTs\|oTs\|oGs\|oA] |
| 1412 | [o5mCs\|oTs\|oTp\|oTs\|oGs\|dGs\|5mCs\|dAs\|dGs\|5mCs\|dTs\|dTs\|dGs\|dTs\|dTs\|5mCs\|oAs\|oTs\|oTs\|oGs\|oA] |
| 1413 | [o5mCs\|oTs\|oTs\|oTp\|oGs\|dGs\|5mCs\|dAs\|dGs\|5mCs\|dTs\|dTs\|dGs\|dTs\|dTs\|5mCs\|oAs\|oTs\|oTs\|oGs\|oA] |
| 1414 | [o5mCs\|oTs\|oTp\|oTp\|oGs\|dGs\|5mCs\|dAs\|dGs\|5mCs\|dTs\|dTs\|dGs\|dTs\|dTs\|5mCs\|oAs\|oTs\|oTs\|oGs\|oA] |
| 1415 | [o5mCs\|oTs\|oTs\|oTs\|oGs\|dGs\|5mCs\|dAs\|dGs\|5mCs\|dTs\|dTs\|dGs\|dTs\|dTs\|5mCs\|oAp\|oTs\|oTs\|oGs\|oA] |
| 1416 | [o5mCs\|oTs\|oTs\|oTs\|oGs\|dGs\|5mCs\|dAs\|dGs\|5mCs\|dTs\|dTs\|dGs\|dTs\|dTs\|5mCp\|oAs\|oTs\|oTs\|oGs\|oA] |
| 1417 | [o5mCs\|oTs\|oTs\|oTs\|oGs\|dGs\|5mCs\|dAs\|dGs\|5mCs\|dTs\|dTs\|dGs\|dTs\|dTs\|5mCp\|oAp\|oTs\|oTs\|oGs\|oA] |
| 1418 | [o5mCs\|oTs\|oTp\|oTs\|oGs\|dGs\|5mCs\|dAs\|dGs\|5mCs\|dTs\|dTs\|dGs\|dTs\|dTs\|5mCs\|oAp\|oTs\|oTs\|oGs\|oA] |
| 1419 | [o5mCs\|oTs\|oTp\|oTs\|oGs\|dGs\|5mCs\|dAs\|dGs\|5mCs\|dTs\|dTs\|dGs\|dTs\|dTs\|5mCp\|oAs\|oTs\|oTs\|oGs\|oA] |
| 1420 | [o5mCs\|oTs\|oTs\|oTp\|oGs\|dGs\|5mCs\|dAs\|dGs\|5mCs\|dTs\|dTs\|dGs\|dTs\|dTs\|5mCs\|oAp\|oTs\|oTs\|oGs\|oA] |
| 1421 | [o5mCs\|oTs\|oTs\|oTp\|oGs\|dGs\|5mCs\|dAs\|dGs\|5mCs\|dTs\|dTs\|dGs\|dTs\|dTs\|5mCp\|oAs\|oTs\|oTs\|oGs\|oA] |
| 1422 | [o5mCs\|oTs\|oTp\|oTs\|oGs\|dGs\|5mCs\|dAs\|dGs\|5mCs\|dTs\|dTs\|dGs\|dTs\|dTs\|5mCp\|oAp\|oTs\|oTs\|oGs\|oA] |
| 1423 | [o5mCs\|oTs\|oTs\|oTp\|oGs\|dGs\|5mCs\|dAs\|dGs\|5mCs\|dTs\|dTs\|dGs\|dTs\|dTs\|5mCp\|oAp\|oTs\|oTs\|oGs\|oA] |
| 1424 | [o5mCs\|oTs\|oTp\|oTp\|oGs\|dGs\|5mCs\|dAs\|dGs\|5mCs\|dTs\|dTs\|dGs\|dTs\|dTs\|5mCs\|oAp\|oTs\|oTs\|oGs\|oA] |
| 1425 | [o5mCs\|oTs\|oTp\|oTp\|oGs\|dGs\|5mCs\|dAs\|dGs\|5mCs\|dTs\|dTs\|dGs\|dTs\|dTs\|5mCp\|oAs\|oTs\|oTs\|oGs\|oA] |
| 1426 | [o5mCs\|oTs\|oTp\|oTp\|oGs\|dGs\|5mCs\|dAs\|dGs\|5mCs\|dTs\|dTs\|dGs\|dTs\|dTs\|5mCp\|oAp\|oTs\|oTs\|oGs\|oA] |
| 1427 | [o5mCs\|oTs\|oTs\|oTs\|oGs\|dGs\|5mCs\|dAs\|dGs\|5mCs\|dTs\|dTs\|dGs\|dTs\|dTs\|5mCs\|dAs\|oTs\|oTs\|oGs\|oAs\|oG] |
| 1428 | [o5mCs\|oTs\|oTp\|oTs\|oGs\|dGs\|5mCs\|dAs\|dGs\|5mCs\|dTs\|dTs\|dGs\|dTs\|dTs\|5mCs\|dAs\|oTs\|oTs\|oGs\|oAs\|oG] |
| 1429 | [o5mCs\|oTs\|oTs\|oTp\|oGs\|dGs\|5mCs\|dAs\|dGs\|5mCs\|dTs\|dTs\|dGs\|dTs\|dTs\|5mCs\|dAs\|oTs\|oTs\|oGs\|oAs\|oG] |
| 1430 | [o5mCs\|oTs\|oTp\|oTp\|oGs\|dGs\|5mCs\|dAs\|dGs\|5mCs\|dTs\|dTs\|dGs\|dTs\|dTs\|5mCs\|dAs\|oTs\|oTs\|oGs\|oAs\|oG] |
| 1431 | [o5mCs\|oTs\|oTs\|oTs\|oGs\|dGs\|5mCs\|dAs\|dGs\|5mCs\|dTs\|dTs\|dGs\|dTs\|dTs\|5mCs\|dAp\|oTs\|oTs\|oGs\|oAs\|oG] |
| 1432 | [o5mCs\|oTs\|oTs\|oTs\|oGs\|dGs\|5mCs\|dAs\|dGs\|5mCs\|dTs\|dTs\|dGs\|dTs\|dTs\|5mCp\|dAs\|oTs\|oTs\|oGs\|oAs\|oG] |
| 1433 | [o5mCs\|oTs\|oTs\|oTs\|oGs\|dGs\|5mCs\|dAs\|dGs\|5mCs\|dTs\|dTs\|dGs\|dTs\|dTs\|5mCp\|dAp\|oTs\|oTs\|oGs\|oAs\|oG] |
| 1434 | [o5mCs\|oTs\|oTp\|oTs\|oGs\|dGs\|5mCs\|dAs\|dGs\|5mCs\|dTs\|dTs\|dGs\|dTs\|dTs\|5mCs\|dAp\|oTs\|oTs\|oGs\|oAs\|oG] |
| 1435 | [o5mCs\|oTs\|oTp\|oTs\|oGs\|dGs\|5mCs\|dAs\|dGs\|5mCs\|dTs\|dTs\|dGs\|dTs\|dTs\|5mCp\|dAs\|oTs\|oTs\|oGs\|oAs\|oG] |
| 1436 | [o5mCs\|oTs\|oTs\|oTp\|oGs\|dGs\|5mCs\|dAs\|dGs\|5mCs\|dTs\|dTs\|dGs\|dTs\|dTs\|5mCs\|dAp\|oTs\|oTs\|oGs\|oAs\|oG] |
| 1437 | [o5mCs\|oTs\|oTs\|oTp\|oGs\|dGs\|5mCs\|dAs\|dGs\|5mCs\|dTs\|dTs\|dGs\|dTs\|dTs\|5mCp\|dAs\|oTs\|oTs\|oGs\|oAs\|oG] |
| 1438 | [o5mCs\|oTs\|oTp\|oTs\|oGs\|dGs\|5mCs\|dAs\|dGs\|5mCs\|dTs\|dTs\|dGs\|dTs\|dTs\|5mCp\|dAp\|oTs\|oTs\|oGs\|oAs\|oG] |
| 1439 | [o5mCs\|oTs\|oTs\|oTp\|oGs\|dGs\|5mCs\|dAs\|dGs\|5mCs\|dTs\|dTs\|dGs\|dTs\|dTs\|5mCp\|dAp\|oTs\|oTs\|oGs\|oAs\|oG] |
| 1440 | [o5mCs\|oTs\|oTp\|oTp\|oGs\|dGs\|5mCs\|dAs\|dGs\|5mCs\|dTs\|dTs\|dGs\|dTs\|dTs\|5mCs\|dAp\|oTs\|oTs\|oGs\|oAs\|oG] |
| 1441 | [o5mCs\|oTs\|oTp\|oTp\|oGs\|dGs\|5mCs\|dAs\|dGs\|5mCs\|dTs\|dTs\|dGs\|dTs\|dTs\|5mCp\|dAs\|oTs\|oTs\|oGs\|oAs\|oG] |
| 1442 | [o5mCs\|oTs\|oTp\|oTp\|oGs\|dGs\|5mCs\|dAs\|dGs\|5mCs\|dTs\|dTs\|dGs\|dTs\|dTs\|5mCp\|dAp\|oTs\|oTs\|oGs\|oAs\|oG] |
| 1443 | [oGs\|LTs\|oAs\|oTs\|oTs\|oTs\|oTs\|oTs\|5mCs\|dGs\|dTs\|dAs\|dTs\|dTs\|dTs\|5mCs\|dTs\|dTs\|oGs\|o5mC] |
| 1444 | [oGs\|oTs\|LAs\|oTs\|oTs\|oTs\|oTs\|oTs\|5mCs\|dGs\|dTs\|dAs\|dTs\|dTs\|dTs\|5mCs\|dTs\|dTs\|oGs\|o5mC] |
| 1445 | [oGs\|oTs\|oAs\|LTs\|oTs\|oTs\|oTs\|oTs\|5mCs\|dGs\|dTs\|dAs\|dTs\|dTs\|dTs\|5mCs\|dTs\|dTs\|oGs\|o5mC] |
| 1446 | [oGs\|oTs\|oAs\|oTs\|LTs\|oTs\|oTs\|oTs\|5mCs\|dGs\|dTs\|dAs\|dTs\|dTs\|dTs\|5mCs\|dTs\|dTs\|oGs\|o5mC] |
| 1447 | [oGs\|oTs\|oAs\|oTs\|oTs\|LTs\|oTs\|oTs\|5mCs\|dGs\|dTs\|dAs\|dTs\|dTs\|dTs\|5mCs\|dTs\|dTs\|oGs\|o5mC] |
| 1448 | [oGs\|oTs\|oAs\|oTs\|oTs\|oTs\|LTs\|oTs\|5mCs\|dGs\|dTs\|dAs\|dTs\|dTs\|dTs\|5mCs\|dTs\|dTs\|oGs\|o5mC] |
| 1449 | [oGs\|oTs\|dAs\|dTs\|dTs\|dTs\|dTs\|dTs\|5mCs\|dGs\|dTs\|dAs\|oTs\|oTs\|oTs\|o5mCs\|oTs\|oTs\|LGs\|o5mC] |
| 1450 | [oGs\|oTs\|dAs\|dTs\|dTs\|dTs\|dTs\|dTs\|5mCs\|dGs\|dTs\|dAs\|oTs\|oTs\|oTs\|o5mCs\|oTs\|LTs\|oGs\|o5mC] |
| 1451 | [oGs\|oTs\|dAs\|dTs\|dTs\|dTs\|dTs\|dTs\|5mCs\|dGs\|dTs\|dAs\|oTs\|oTs\|oTs\|o5mCs\|LTs\|oTs\|oGs\|o5mC] |
| 1452 | [oGs\|oTs\|dAs\|dTs\|dTs\|dTs\|dTs\|dTs\|5mCs\|dGs\|dTs\|dAs\|oTs\|oTs\|oTs\|L5mCs\|oTs\|oTs\|oGs\|o5mC] |
| 1453 | [oGs\|oTs\|dAs\|dTs\|dTs\|dTs\|dTs\|dTs\|5mCs\|dGs\|dTs\|dAs\|oTs\|oTs\|LTs\|o5mCs\|oTs\|oTs\|oGs\|o5mC] |
| 1454 | [oGs\|oTs\|dAs\|dTs\|dTs\|dTs\|dTs\|dTs\|5mCs\|dGs\|dTs\|dAs\|oTs\|LTs\|oTs\|o5mCs\|oTs\|oTs\|oGs\|o5mC] |
| 1455 | [oGs\|LTs\|oAs\|oTs\|oTs\|oTs\|oTs\|dTs\|5mCs\|dGs\|dTs\|dAs\|dTs\|dTs\|dTs\|5mCs\|dTs\|oTs\|oGs\|o5mC] |
| 1456 | [oGs\|oTs\|LAs\|oTs\|oTs\|oTs\|oTs\|dTs\|5mCs\|dGs\|dTs\|dAs\|dTs\|dTs\|dTs\|5mCs\|dTs\|oTs\|oGs\|o5mC] |
| 1457 | [oGs\|oTs\|oAs\|LTs\|oTs\|oTs\|oTs\|dTs\|5mCs\|dGs\|dTs\|dAs\|dTs\|dTs\|dTs\|5mCs\|dTs\|oTs\|oGs\|o5mC] |
| 1458 | [oGs\|oTs\|oAs\|oTs\|LTs\|oTs\|oTs\|dTs\|5mCs\|dGs\|dTs\|dAs\|dTs\|dTs\|dTs\|5mCs\|dTs\|oTs\|oGs\|o5mC] |
| 1459 | [oGs\|oTs\|oAs\|oTs\|oTs\|LTs\|oTs\|dTs\|5mCs\|dGs\|dTs\|dAs\|dTs\|dTs\|dTs\|5mCs\|dTs\|oTs\|oGs\|o5mC] |
| 1460 | [oGs\|oTs\|oAs\|dTs\|dTs\|dTs\|dTs\|dTs\|5mCs\|dGs\|dTs\|dAs\|dTs\|oTs\|oTs\|o5mCs\|oTs\|oTs\|LGs\|o5mC] |
| 1461 | [oGs\|oTs\|oAs\|dTs\|dTs\|dTs\|dTs\|dTs\|5mCs\|dGs\|dTs\|dAs\|dTs\|oTs\|oTs\|o5mCs\|oTs\|LTs\|oGs\|o5mC] |
| 1462 | [oGs\|oTs\|oAs\|dTs\|dTs\|dTs\|dTs\|dTs\|5mCs\|dGs\|dTs\|dAs\|dTs\|oTs\|oTs\|o5mCs\|LTs\|oTs\|oGs\|o5mC] |
| 1463 | [oGs\|oTs\|oAs\|dTs\|dTs\|dTs\|dTs\|dTs\|5mCs\|dGs\|dTs\|dAs\|dTs\|oTs\|oTs\|L5mCs\|oTs\|oTs\|oGs\|o5mC] |
| 1464 | [oGs\|oTs\|oAs\|dTs\|dTs\|dTs\|dTs\|dTs\|5mCs\|dGs\|dTs\|dAs\|dTs\|oTs\|LTs\|o5mCs\|oTs\|oTs\|oGs\|o5mC] |
| 1465 | [oGs\|LTs\|oAs\|oTs\|oTs\|oTs\|oTs\|dTs\|5mCs\|dGs\|dTs\|dAs\|dTs\|dTs\|dTs\|5mCs\|dTs\|oTs\|oG] |
| 1466 | [oGs\|oTs\|LAs\|oTs\|oTs\|oTs\|oTs\|dTs\|5mCs\|dGs\|dTs\|dAs\|dTs\|dTs\|dTs\|5mCs\|dTs\|oTs\|oG] |
| 1467 | [oGs\|oTs\|oAs\|LTs\|oTs\|oTs\|oTs\|dTs\|5mCs\|dGs\|dTs\|dAs\|dTs\|dTs\|dTs\|5mCs\|dTs\|oTs\|oG] |
| 1468 | [oGs\|oTs\|oAs\|oTs\|LTs\|oTs\|oTs\|dTs\|5mCs\|dGs\|dTs\|dAs\|dTs\|dTs\|dTs\|5mCs\|dTs\|oTs\|oG] |
| 1469 | [oGs\|oTs\|oAs\|oTs\|oTs\|LTs\|oTs\|dTs\|5mCs\|dGs\|dTs\|dAs\|dTs\|dTs\|dTs\|5mCs\|dTs\|oTs\|oG] |
| 1470 | [oTs\|oAs\|dTs\|dTs\|dTs\|dTs\|dTs\|5mCs\|dGs\|dTs\|dAs\|dTs\|oTs\|oTs\|o5mCs\|oTs\|oTsILGs\|o5mC] |
| 1471 | [oTs\|oAs\|dTs\|dTs\|dTs\|dTs\|dTs\|5mCs\|dGs\|dTs\|dAs\|dTs\|oTs\|oTs\|o5mCs\|oTs\|LTs\|oGs\|o5mC] |
| 1472 | [oTs\|oAs\|dTs\|dTs\|dTs\|dTs\|dTs\|5mCs\|dGs\|dTs\|dAs\|dTs\|oTs\|oTs\|o5mCs\|LTs\|oTs\|oGs\|o5mC] |
| 1473 | [oTs\|oAs\|dTs\|dTs\|dTs\|dTs\|dTs\|5mCs\|dGs\|dTs\|dAs\|dTs\|oTs\|oTs\|L5mCs\|oTs\|oTs\|oGs\|o5mC] |
| 1474 | [oTs\|oAs\|dTs\|dTs\|dTs\|dTs\|dTs\|5mCs\|dGs\|dTs\|dAs\|dTs\|oTs\|LTs\|o5mCs\|oTs\|oTs\|oGs\|o5mC] |
| 1475 | [oGs\|LTs\|oAs\|oTs\|oTs\|oTs\|dTs\|dTs\|5mCs\|dGs\|dTs\|dAs\|dTs\|dTs\|dTs\|5mCs\|oTs\|oTs\|oGs\|o5mC] |
| 1476 | [oGs\|oTs\|LAs\|oTs\|oTs\|oTs\|dTs\|dTs\|5mCs\|dGs\|dTs\|dAs\|dTs\|dTs\|dTs\|5mCs\|oTs\|oTs\|oGs\|o5mC] |
| 1477 | [oGs\|oTs\|oAs\|LTs\|oTs\|oTs\|dTs\|dTs\|5mCs\|dGs\|dTs\|dAs\|dTs\|dTs\|dTs\|5mCs\|oTs\|oTs\|oGs\|o5mC] |
| 1478 | [oGs\|oTs\|oAs\|oTs\|LTs\|oTs\|dTs\|dTs\|5mCs\|dGs\|dTs\|dAs\|dTs\|dTs\|dTs\|5mCs\|oTs\|oTs\|oGs\|o5mC] |
| 1479 | [oGs\|oTs\|oAs\|oTs\|dTs\|dTs\|dTs\|dTs\|5mCs\|dGs\|dTs\|dAs\|dTs\|dTs\|oTs\|o5mCs\|oTs\|oTsILGs\|o5mC] |
| 1480 | [oGs\|oTs\|oAs\|oTs\|dTs\|dTs\|dTs\|dTs\|5mCs\|dGs\|dTs\|dAs\|dTs\|dTs\|oTs\|o5mCs\|oTs\|LTs\|oGs\|o5mC] |
| 1481 | [oGs\|oTs\|oAs\|oTs\|dTs\|dTs\|dTs\|dTs\|5mCs\|dGs\|dTs\|dAs\|dTs\|dTs\|oTs\|o5mCs\|LTs\|oTs\|oGs\|o5mC] |
| 1482 | [oGs\|oTs\|oAs\|oTs\|dTs\|dTs\|dTs\|dTs\|5mCs\|dGs\|dTs\|dAs\|dTs\|dTs\|oTs\|L5mCs\|oTs\|oTs\|oGs\|o5mC] |
| 1483 | [oGs\|LTs\|oAs\|oTs\|oTs\|oTs\|dTs\|dTs\|5mCs\|dGs\|dTs\|dAs\|dTs\|dTs\|dTs\|5mCs\|oTs\|oTs\|oG] |
| 1484 | [oGs\|oTs\|LAs\|oTs\|oTs\|oTs\|dTs\|dTs\|5mCs\|dGs\|dTs\|dAs\|dTs\|dTs\|dTs\|5mCs\|oTs\|oTs\|oG] |
| 1485 | [oGs\|oTs\|oAs\|LTs\|oTs\|oTs\|dTs\|dTs\|5mCs\|dGs\|dTs\|dAs\|dTs\|dTs\|dTs\|5mCs\|oTs\|oTs\|oG] |
| 1486 | [oGs\|oTs\|oAs\|oTs\|LTs\|oTs\|dTs\|dTs\|5mCs\|dGs\|dTs\|dAs\|dTs\|dTs\|dTs\|5mCs\|oTs\|oTs\|oG] |
| 1487 | [oGs\|oTs\|oAs\|dTs\|dTs\|dTs\|dTs\|dTs\|5mCs\|dGs\|dTs\|dAs\|dTs\|dTs\|oTs\|o5mCs\|oTs\|oTs\|LGs\|o5mC] |
| 1488 | [oGs\|oTs\|oAs\|dTs\|dTs\|dTs\|dTs\|dTs\|5mCs\|dGs\|dTs\|dAs\|dTs\|dTs\|oTs\|o5mCs\|oTs\|LTs\|oGs\|o5mC] |
| 1489 | [oGs\|oTs\|oAs\|dTs\|dTs\|dTs\|dTs\|dTs\|5mCs\|dGs\|dTs\|dAs\|dTs\|dTs\|oTs\|o5mCs\|LTs\|oTs\|oGs\|o5mC] |
| 1490 | [oGs\|LTs\|oAs\|oTs\|oTs\|oTs\|dTs\|dTs\|5mCs\|dGs\|dTs\|dAs\|dTs\|dTs\|dTs\|5mCs\|oTs\|oT] |
| 1491 | [oGs\|oTs\|LAs\|oTs\|oTs\|oTs\|dTs\|dTs\|5mCs\|dGs\|dTs\|dAs\|dTs\|dTs\|dTs\|5mCs\|oTs\|oT] |
| 1492 | [oGs\|oTs\|oAs\|LTs\|oTs\|oTs\|dTs\|dTs\|5mCs\|dGs\|dTs\|dAs\|dTs\|dTs\|dTs\|5mCs\|oTs\|oT] |
| 1493 | [oGs\|oTs\|oAs\|oTs\|LTs\|oTs\|dTs\|dTs\|5mCs\|dGs\|dTs\|dAs\|dTs\|dTs\|dTs\|5mCs\|oTs\|oT] |
| 1494 | [oAs\|oTs\|dTs\|dTs\|dTs\|dTs\|5mCs\|dGs\|dTs\|dAs\|dTs\|dTs\|oTs\|o5mCs\|oTs\|oTs\|LGs\|o5mC] |
| 1495 | [oAs\|oTs\|dTs\|dTs\|dTs\|dTs\|5mCs\|dGs\|dTs\|dAs\|dTs\|dTs\|oTs\|o5mCs\|oTs\|LTs\|oGs\|o5mC] |
| 1496 | [oAs\|oTs\|dTs\|dTs\|dTs\|dTs\|5mCs\|dGs\|dTs\|dAs\|dTs\|dTs\|oTs\|o5mCs\|LTs\|oTs\|oGs\|o5mC] |
| 1497 | [oAs\|oTs\|dTs\|dTs\|dTs\|dTs\|5mCs\|dGs\|dTs\|dAs\|dTs\|dTs\|oTs\|L5mCs\|oTs\|oTs\|oGs\|o5mC] |
| 1498 | [oGs\|LTs\|oAs\|oTs\|oTs\|dTs\|dTs\|dTs\|5mCs\|dGs\|dTs\|dAs\|dTs\|dTs\|dTs\|o5mCs\|oTs\|oTs\|oGs\|o5mC] |
| 1499 | [oGs\|oTs\|LAs\|oTs\|oTs\|dTs\|dTs\|dTs\|5mCs\|dGs\|dTs\|dAs\|dTs\|dTs\|dTs\|o5mCs\|oTs\|oTs\|oGs\|o5mC] |
| 1500 | [oGs\|oTs\|oAs\|LTs\|oTs\|dTs\|dTs\|dTs\|5mCs\|dGs\|dTs\|dAs\|dTs\|dTs\|dTs\|o5mCs\|oTs\|oTs\|oGs\|o5mC] |
| 1501 | [oGs\|oTs\|oAs\|oTs\|oTs\|dTs\|dTs\|dTs\|5mCs\|dGs\|dTs\|dAs\|dTs\|dTs\|dTs\|o5mCs\|oTs\|oTs\|LGs\|o5mC] |
| 1502 | [oGs\|oTs\|oAs\|oTs\|oTs\|dTs\|dTs\|dTs\|5mCs\|dGs\|dTs\|dAs\|dTs\|dTs\|dTs\|o5mCs\|oTs\|LTs\|oGs\|o5mC] |
| 1503 | [oGs\|oTs\|oAs\|oTs\|oTs\|dTs\|dTs\|dTs\|5mCs\|dGs\|dTs\|dAs\|dTs\|dTs\|dTs\|o5mCs\|LTs\|oTs\|oGs\|o5mC] |
| 1504 | [oGs\|LTs\|oAs\|oTs\|oTs\|dTs\|dTs\|dTs\|5mCs\|dGs\|dTs\|dAs\|dTs\|dTs\|dTs\|o5mCs\|oTs\|oTs\|oG] |
| 1505 | [oGs\|oTs\|LAs\|oTs\|oTs\|dTs\|dTs\|dTs\|5mCs\|dGs\|dTs\|dAs\|dTs\|dTs\|dTs\|o5mCs\|oTs\|oTs\|oG] |
| 1506 | [oGs\|oTs\|oAs\|LTs\|oTs\|dTs\|dTs\|dTs\|5mCs\|dGs\|dTs\|dAs\|dTs\|dTs\|dTs\|o5mCs\|oTs\|oTs\|oG] |
| 1507 | [oTs\|oAs\|oTs\|oTs\|dTs\|dTs\|dTs\|5mCs\|dGs\|dTs\|dAs\|dTs\|dTs\|dTs\|o5mCs\|oTs\|oTs\|LGs\|o5mC] |
| 1508 | [oTs\|oAs\|oTs\|oTs\|dTs\|dTs\|dTs\|5mCs\|dGs\|dTs\|dAs\|dTs\|dTs\|dTs\|o5mCs\|oTs\|LTs\|oGs\|o5mC] |
| 1509 | [oTs\|oAs\|oTs\|oTs\|dTs\|dTs\|dTs\|5mCs\|dGs\|dTs\|dAs\|dTs\|dTs\|dTs\|o5mCs\|LTs\|oTs\|oGs\|o5mC] |
| 1510 | [oGs\|LTs\|oAs\|oTs\|oTs\|dTs\|dTs\|dTs\|5mCs\|dGs\|dTs\|dAs\|dTs\|dTs\|dTs\|o5mCs\|oTs\|oT] |
| 1511 | [oGs\|oTs\|LAs\|oTs\|oTs\|dTs\|dTs\|dTs\|5mCs\|dGs\|dTs\|dAs\|dTs\|dTs\|dTs\|o5mCs\|oTs\|oT] |
| 1512 | [oGs\|oTs\|oAs\|LTs\|oTs\|dTs\|dTs\|dTs\|5mCs\|dGs\|dTs\|dAs\|dTs\|dTs\|dTs\|o5mCs\|oTs\|oT] |
| 1513 | [oAs\|oTs\|oTs\|dTs\|dTs\|dTs\|5mCs\|dGs\|dTs\|dAs\|dTs\|dTs\|dTs\|o5mCs\|oTs\|oTs\|LGs\|o5mC] |
| 1514 | [oAs\|oTs\|oTs\|dTs\|dTs\|dTs\|5mCs\|dGs\|dTs\|dAs\|dTs\|dTs\|dTs\|o5mCs\|oTs\|LTs\|oGs\|o5mC] |
| 1515 | [oAs\|oTs\|oTs\|dTs\|dTs\|dTs\|5mCs\|dGs\|dTs\|dAs\|dTs\|dTs\|dTs\|o5mCs\|LTs\|oTs\|oGs\|o5mC] |
| 1516 | [oGs\|LTs\|oAs\|oTs\|oTs\|dTs\|dTs\|dTs\|5mCs\|dGs\|dTs\|dAs\|dTs\|dTs\|dTs\|o5mCs\|oT] |
| 1517 | [oGs\|oTs\|LAs\|oTs\|oTs\|dTs\|dTs\|dTs\|5mCs\|dGs\|dTs\|dAs\|dTs\|dTs\|dTs\|o5mCs\|oT] |
| 1518 | [oGs\|oTs\|oAs\|LTs\|oTs\|dTs\|dTs\|dTs\|5mCs\|dGs\|dTs\|dAs\|dTs\|dTs\|dTs\|o5mCs\|oT] |
| 1519 | [oTs\|oTs\|dTs\|dTs\|dTs\|5mCs\|dGs\|dTs\|dAs\|dTs\|dTs\|dTs\|o5mCs\|oTs\|oTs\|LGs\|o5mC] |
| 1520 | [oTs\|oTs\|dTs\|dTs\|dTs\|5mCs\|dGs\|dTs\|dAs\|dTs\|dTs\|dTs\|o5mCs\|oTs\|LTs\|oGs\|o5mC] |
| 1521 | [oTs\|oTs\|dTs\|dTs\|dTs\|5mCs\|dGs\|dTs\|dAs\|dTs\|dTs\|dTs\|o5mCs\|LTs\|oTs\|oGs\|o5mC] |
| 1522 | [oTs\|LAs\|oTs\|oTs\|dTs\|dTs\|dTs\|5mCs\|dGs\|dTs\|dAs\|dTs\|dTs\|dTs\|o5mCs\|oTs\|oTs\|oGs\|o5mC] |
| 1523 | [oTs\|oAs\|LTs\|oTs\|dTs\|dTs\|dTs\|5mCs\|dGs\|dTs\|dAs\|dTs\|dTs\|dTs\|o5mCs\|oTs\|oTs\|oGs\|o5mC] |
| 1524 | [oGs\|oTs\|oAs\|oTs\|oTs\|dTs\|dTs\|dTs\|5mCs\|dGs\|dTs\|dAs\|dTs\|dTs\|dTs\|o5mCs\|oTs\|LTs\|oG] |
| 1525 | [oGs\|oTs\|oAs\|oTs\|oTs\|dTs\|dTs\|dTs\|5mCs\|dGs\|dTs\|dAs\|dTs\|dTs\|dTs\|o5mCs\|LTs\|oTs\|oG] |
| 1526 | [oTs\|LAs\|oTs\|oTs\|dTs\|dTs\|dTs\|5mCs\|dGs\|dTs\|dAs\|dTs\|dTs\|dTs\|o5mCs\|oTs\|oTs\|oG] |
| 1527 | [oTs\|oAs\|LTs\|oTs\|dTs\|dTs\|dTs\|5mCs\|dGs\|dTs\|dAs\|dTs\|dTs\|dTs\|o5mCs\|oTs\|oTs\|oG] |
| 1528 | [oTs\|oAs\|oTs\|oTs\|dTs\|dTs\|dTs\|5mCs\|dGs\|dTs\|dAs\|dTs\|dTs\|dTs\|o5mCs\|oTs\|LTs\|oG] |
| 1529 | [oTs\|oAs\|oTs\|oTs\|dTs\|dTs\|dTs\|5mCs\|dGs\|dTs\|dAs\|dTs\|dTs\|dTs\|o5mCs\|LTs\|oTs\|oG] |
| 1530 | [oTs\|LAs\|oTs\|oTs\|dTs\|dTs\|dTs\|5mCs\|dGs\|dTs\|dAs\|dTs\|dTs\|dTs\|o5mCs\|oTs\|oT] |
| 1531 | [oTs\|oAs\|LTs\|oTs\|dTs\|dTs\|dTs\|5mCs\|dGs\|dTs\|dAs\|dTs\|dTs\|dTs\|o5mCs\|oTs\|oT] |
| 1532 | [oTs\|oAs\|oTs\|oTs\|dTs\|dTs\|dTs\|5mCs\|dGs\|dTs\|dAs\|dTs\|dTs\|dTs\|o5mCs\|LTs\|oT] |
| 1533 | [oGs\|oTs\|oAs\|oTs\|oTs\|oTs\|oTs\|oTs\|5mCs\|dGs\|dTs\|dAs\|dTs\|dTs\|dTs\|5mCs\|dTs\|dTs\|oGs\|o5mC] |
| 1534 | [oGs\|oTs\|dAs\|dTs\|dTs\|dTs\|dTs\|dTs\|5mCs\|dGs\|dTs\|dAs\|oTs\|oTs\|oTs\|o5mCs\|oTs\|oTs\|oGs\|o5mC] |
| 1535 | [oGs\|oTs\|oAs\|oTs\|oTs\|oTs\|oTs\|dTs\|5mCs\|dGs\|dTs\|dAs\|dTs\|dTs\|dTs\|5mCs\|dTs\|oTs\|oGs\|o5mC] |
| 1536 | [oGs\|oTs\|oAs\|dTs\|dTs\|dTs\|dTs\|dTs\|5mCs\|dGs\|dTs\|dAs\|dTs\|oTs\|oTs\|o5mCs\|oTs\|oTs\|oGs\|o5mC] |
| 1537 | [oGs\|oTs\|oAs\|oTs\|oTs\|oTs\|oTs\|dTs\|5mCs\|dGs\|dTs\|dAs\|dTs\|dTs\|dTs\|5mCs\|dTs\|oTs\|oG] |
| 1538 | [oTs\|oAs\|dTs\|dTs\|dTs\|dTs\|dTs\|5mCs\|dGs\|dTs\|dAs\|dTs\|oTs\|oTs\|o5mCs\|oTs\|oTs\|oGs\|o5mC] |
| 1539 | [oGs\|oTs\|oAs\|oTs\|oTs\|oTs\|dTs\|dTs\|5mCs\|dGs\|dTs\|dAs\|dTs\|dTs\|dTs\|5mCs\|oTs\|oTs\|oGs\|o5mC] |
| 1540 | [oGs\|oTs\|oAs\|oTs\|dTs\|dTs\|dTs\|dTs\|5mCs\|dGs\|dTs\|dAs\|dTs\|dTs\|oTs\|o5mCs\|oTs\|oTs\|oGs\|o5mC] |
| 1541 | [oGs\|oTs\|oAs\|oTs\|oTs\|oTs\|dTs\|dTs\|5mCs\|dGs\|dTs\|dAs\|dTs\|dTs\|dTs\|5mCs\|oTs\|oTs\|oG] |
| 1542 | [oGs\|oTs\|oAs\|dTs\|dTs\|dTs\|dTs\|dTs\|5mCs\|dGs\|dTs\|dAs\|dTs\|dTs\|oTs\|o5mCs\|oTs\|oTs\|oGs\|o5mC] |
| 1543 | [oGs\|oTs\|oAs\|oTs\|oTs\|oTs\|dTs\|dTs\|5mCs\|dGs\|dTs\|dAs\|dTs\|dTs\|dTs\|5mCs\|oTs\|oT] |
| 1544 | [oAs\|oTs\|dTs\|dTs\|dTs\|dTs\|5mCs\|dGs\|dTs\|dAs\|dTs\|dTs\|oTs\|o5mCs\|oTs\|oTs\|oGs\|o5mC] |
| 1545 | [oGs\|oTs\|oAs\|oTs\|oTs\|dTs\|dTs\|dTs\|5mCs\|dGs\|dTs\|dAs\|dTs\|dTs\|dTs\|o5mCs\|oTs\|oTs\|oGs\|o5mC] |
| 1546 | [oGs\|oTs\|oAs\|oTs\|oTs\|dTs\|dTs\|dTs\|5mCs\|dGs\|dTs\|dAs\|dTs\|dTs\|dTs\|o5mCs\|oTs\|oTs\|oG] |
| 1547 | [oGs\|oTs\|oAs\|oTs\|oTs\|dTs\|dTs\|dTs\|5mCs\|dGs\|dTs\|dAs\|dTs\|dTs\|dTs\|o5mCs\|oTs\|oT] |
| 1548 | [oAs\|oTs\|oTs\|dTs\|dTs\|dTs\|5mCs\|dGs\|dTs\|dAs\|dTs\|dTs\|dTs\|o5mCs\|oTs\|oTs\|oGs\|o5mC] |
| 1549 | [oGs\|oTs\|oAs\|oTs\|oTs\|dTs\|dTs\|dTs\|5mCs\|dGs\|dTs\|dAs\|dTs\|dTs\|dTs\|o5mCs\|oT] |
| 1550 | [oTs\|oTs\|dTs\|dTs\|dTs\|5mCs\|dGs\|dTs\|dAs\|dTs\|dTs\|dTs\|o5mCs\|oTs\|oTs\|oGs\|o5mC] |
| 1551 | [oTs\|oAs\|oTs\|oTs\|dTs\|dTs\|dTs\|5mCs\|dGs\|dTs\|dAs\|dTs\|dTs\|dTs\|o5mCs\|oTs\|oTs\|oGs\|o5mC] |
| 1552 | [oTs\|oAs\|oTs\|oTs\|dTs\|dTs\|dTs\|5mCs\|dGs\|dTs\|dAs\|dTs\|dTs\|dTs\|o5mCs\|oTs\|oTs\|oG] |
| 1553 | [oTs\|oAs\|oTs\|oTs\|dTs\|dTs\|dTs\|5mCs\|dGs\|dTs\|dAs\|dTs\|dTs\|dTs\|o5mCs\|oTs\|oT] |
| 1554 | [oGs\|oTs\|oAp\|oTs\|oTs\|dTs\|dTs\|dTs\|5mCs\|dGs\|dTs\|dAs\|dTs\|dTs\|dTs\|o5mCs\|oTs\|oTs\|oGs\|o5mC] |
| 1555 | [oGs\|oTs\|oAs\|oTp\|oTs\|dTs\|dTs\|dTs\|5mCs\|dGs\|dTs\|dAs\|dTs\|dTs\|dTs\|o5mCs\|oTs\|oTs\|oGs\|o5mC] |
| 1556 | [oGs\|oTs\|oAp\|oTp\|oTs\|dTs\|dTs\|dTs\|5mCs\|dGs\|dTs\|dAs\|dTs\|dTs\|dTs\|o5mCs\|oTs\|oTs\|oGs\|o5mC] |
| 1557 | [oGs\|oTs\|oAs\|oTs\|oTs\|dTs\|dTs\|dTs\|5mCs\|dGs\|dTs\|dAs\|dTs\|dTs\|dTs\|o5mCs\|oTp\|oTs\|oGs\|o5mC] |
| 1558 | [oGs\|oTs\|oAs\|oTs\|oTs\|dTs\|dTs\|dTs\|5mCs\|dGs\|dTs\|dAs\|dTs\|dTs\|dTs\|o5mCp\|oTs\|oTs\|oGs\|o5mC] |
| 1559 | [oGs\|oTs\|oAs\|oTs\|oTs\|dTs\|dTs\|dTs\|5mCs\|dGs\|dTs\|dAs\|dTs\|dTs\|dTs\|o5mCp\|oTp\|oTs\|oGs\|o5mC] |
| 1560 | [oGs\|oTs\|oAp\|oTs\|oTs\|dTs\|dTs\|dTs\|5mCs\|dGs\|dTs\|dAs\|dTs\|dTs\|dTs\|o5mCs\|oTp\|oTs\|oGs\|o5mC] |
| 1561 | [oGs\|oTs\|oAp\|oTs\|oTs\|dTs\|dTs\|dTs\|5mCs\|dGs\|dTs\|dAs\|dTs\|dTs\|dTs\|o5mCp\|oTs\|oTs\|oGs\|o5mC] |
| 1562 | [oGs\|oTs\|oAs\|oTp\|oTs\|dTs\|dTs\|dTs\|5mCs\|dGs\|dTs\|dAs\|dTs\|dTs\|dTs\|o5mCs\|oTp\|oTs\|oGs\|o5mC] |
| 1563 | [oGs\|oTs\|oAs\|oTp\|oTs\|dTs\|dTs\|dTs\|5mCs\|dGs\|dTs\|dAs\|dTs\|dTs\|dTs\|o5mCp\|oTs\|oTs\|oGs\|o5mC] |
| 1564 | [oGs\|oTs\|oAp\|oTs\|oTs\|dTs\|dTs\|dTs\|5mCs\|dGs\|dTs\|dAs\|dTs\|dTs\|dTs\|o5mCp\|oTp\|oTs\|oGs\|o5mC] |
| 1565 | [oGs\|oTs\|oAs\|oTp\|oTs\|dTs\|dTs\|dTs\|5mCs\|dGs\|dTs\|dAs\|dTs\|dTs\|dTs\|o5mCp\|oTp\|oTs\|oGs\|o5mC] |
| 1566 | [oGs\|oTs\|oAp\|oTp\|oTs\|dTs\|dTs\|dTs\|5mCs\|dGs\|dTs\|dAs\|dTs\|dTs\|dTs\|o5mCs\|oTp\|oTs\|oGs\|o5mC] |
| 1567 | [oGs\|oTs\|oAp\|oTp\|oTs\|dTs\|dTs\|dTs\|5mCs\|dGs\|dTs\|dAs\|dTs\|dTs\|dTs\|o5mCp\|oTs\|oTs\|oGs\|o5mC] |
| 1568 | [oGs\|oTs\|oAp\|oTp\|oTs\|dTs\|dTs\|dTs\|5mCs\|dGs\|dTs\|dAs\|dTs\|dTs\|dTs\|o5mCp\|oTp\|oTs\|oGs\|o5mC] |
| 1569 | [oGs\|oTs\|oAs\|oTs\|oTs\|dTs\|dTs\|dTs\|5mCs\|dGs\|dTs\|dAs\|dTs\|dTs\|dTs\|o5mCs\|oTs\|oTs\|oGs\|o5mCs\|oA] |
| 1570 | [oGs\|oTs\|oAp\|oTs\|oTs\|dTs\|dTs\|dTs\|5mCs\|dGs\|dTs\|dAs\|dTs\|dTs\|dTs\|o5mCs\|oTs\|oTs\|oGs\|o5mCs\|oA] |
| 1571 | [oGs\|oTs\|oAs\|oTp\|oTs\|dTs\|dTs\|dTs\|5mCs\|dGs\|dTs\|dAs\|dTs\|dTs\|dTs\|o5mCs\|oTs\|oTs\|oGs\|o5mCs\|oA] |
| 1572 | [oGs\|oTs\|oAp\|oTp\|oTs\|dTs\|dTs\|dTs\|5mCs\|dGs\|dTs\|dAs\|dTs\|dTs\|dTs\|o5mCs\|oTs\|oTs\|oGs\|o5mCs\|oA] |
| 1573 | [oGs\|oTs\|oAs\|oTs\|oTs\|dTs\|dTs\|dTs\|5mCs\|dGs\|dTs\|dAs\|dTs\|dTs\|dTs\|o5mCs\|oTp\|oTs\|oGs\|o5mCs\|oA] |
| 1574 | [oGs\|oTs\|oAs\|oTs\|oTs\|dTs\|dTs\|dTs\|5mCs\|dGs\|dTs\|dAs\|dTs\|dTs\|dTs\|o5mCp\|oTs\|oTs\|oGs\|o5mCs\|oA] |
| 1575 | [oGs\|oTs\|oAs\|oTs\|oTs\|dTs\|dTs\|dTs\|5mCs\|dGs\|dTs\|dAs\|dTs\|dTs\|dTs\|o5mCp\|oTp\|oTs\|oGs\|o5mCs\|oA] |
| 1576 | [oGs\|oTs\|oAp\|oTs\|oTs\|dTs\|dTs\|dTs\|5mCs\|dGs\|dTs\|dAs\|dTs\|dTs\|dTs\|o5mCs\|oTp\|oTs\|oGs\|o5mCs\|oA] |
| 1577 | [oGs\|oTs\|oAp\|oTs\|oTs\|dTs\|dTs\|dTs\|5mCs\|dGs\|dTs\|dAs\|dTs\|dTs\|dTs\|o5mCp\|oTs\|oTs\|oGs\|o5mCs\|oA] |
| 1578 | [oGs\|oTs\|oAs\|oTp\|oTs\|dTs\|dTs\|dTs\|5mCs\|dGs\|dTs\|dAs\|dTs\|dTs\|dTs\|o5mCs\|oTp\|oTs\|oGs\|o5mCs\|oA] |
| 1579 | [oGs\|oTs\|oAs\|oTp\|oTs\|dTs\|dTs\|dTs\|5mCs\|dGs\|dTs\|dAs\|dTs\|dTs\|dTs\|o5mCp\|oTs\|oTs\|oGs\|o5mCs\|oA] |
| 1580 | [oGs\|oTs\|oAp\|oTs\|oTs\|dTs\|dTs\|dTs\|5mCs\|dGs\|dTs\|dAs\|dTs\|dTs\|dTs\|o5mCp\|oTp\|oTs\|oGs\|o5mCs\|oA] |
| 1581 | [oGs\|oTs\|oAs\|oTp\|oTs\|dTs\|dTs\|dTs\|5mCs\|dGs\|dTs\|dAs\|dTs\|dTs\|dTs\|o5mCp\|oTp\|oTs\|oGs\|o5mCs\|oA] |
| 1582 | [oGs\|oTs\|oAp\|oTp\|oTs\|dTs\|dTs\|dTs\|5mCs\|dGs\|dTs\|dAs\|dTs\|dTs\|dTs\|o5mCs\|oTp\|oTs\|oGs\|o5mCs\|oA] |
| 1583 | [oGs\|oTs\|oAp\|oTp\|oTs\|dTs\|dTs\|dTs\|5mCs\|dGs\|dTs\|dAs\|dTs\|dTs\|dTs\|o5mCp\|oTs\|oTs\|oGs\|o5mCs\|oA] |
| 1584 | [oGs\|oTs\|oAp\|oTp\|oTs\|dTs\|dTs\|dTs\|5mCs\|dGs\|dTs\|dAs\|dTs\|dTs\|dTs\|o5mCp\|oTp\|oTs\|oGs\|o5mCs\|oA] |
| 1585 | [oGs\|oTs\|oAs\|oTs\|oTs\|dTs\|dTs\|dTs\|5mCs\|dGs\|dTs\|dAs\|dTs\|dTs\|dTs\|o5mCs\|oTs\|oTs\|oGs\|o5mCs\|oAs\|oA] |
| 1586 | [oGs\|oTs\|oAp\|oTs\|oTs\|dTs\|dTs\|dTs\|5mCs\|dGs\|dTs\|dAs\|dTs\|dTs\|dTs\|o5mCs\|oTs\|oTs\|oGs\|o5mCs\|oAs\|oA] |
| 1587 | [oGs\|oTs\|oAs\|oTp\|oTs\|dTs\|dTs\|dTs\|5mCs\|dGs\|dTs\|dAs\|dTs\|dTs\|dTs\|o5mCs\|oTs\|oTs\|oGs\|o5mCs\|oAs\|oA] |
| 1588 | [oGs\|oTs\|oAp\|oTp\|oTs\|dTs\|dTs\|dTs\|5mCs\|dGs\|dTs\|dAs\|dTs\|dTs\|dTs\|o5mCs\|oTs\|oTs\|oGs\|o5mCs\|oAs\|oA] |
| 1589 | [oGs\|oTs\|oAs\|oTs\|oTs\|dTs\|dTs\|dTs\|5mCs\|dGs\|dTs\|dAs\|dTs\|dTs\|dTs\|o5mCs\|oTp\|oTs\|oGs\|o5mCs\|oAs\|oA] |
| 1590 | [oGs\|oTs\|oAs\|oTs\|oTs\|dTs\|dTs\|dTs\|5mCs\|dGs\|dTs\|dAs\|dTs\|dTs\|dTs\|o5mCp\|oTs\|oTs\|oGs\|o5mCs\|oAs\|oA] |
| 1591 | [oGs\|oTs\|oAs\|oTs\|oTs\|dTs\|dTs\|dTs\|5mCs\|dGs\|dTs\|dAs\|dTs\|dTs\|dTs\|o5mCp\|oTp\|oTs\|oGs\|o5mCs\|oAs\|oA] |
| 1592 | [oGs\|oTs\|oAp\|oTs\|oTs\|dTs\|dTs\|dTs\|5mCs\|dGs\|dTs\|dAs\|dTs\|dTs\|dTs\|o5mCs\|oTp\|oTs\|oGs\|o5mCs\|oAs\|oA] |
| 1593 | [oGs\|oTs\|oAp\|oTs\|oTs\|dTs\|dTs\|dTs\|5mCs\|dGs\|dTs\|dAs\|dTs\|dTs\|dTs\|o5mCp\|oTs\|oTs\|oGs\|o5mCs\|oAs\|oA] |
| 1594 | [oGs\|oTs\|oAs\|oTp\|oTs\|dTs\|dTs\|dTs\|5mCs\|dGs\|dTs\|dAs\|dTs\|dTs\|dTs\|o5mCs\|oTp\|oTs\|oGs\|o5mCs\|oAs\|oA] |
| 1595 | [oGs\|oTs\|oAs\|oTp\|oTs\|dTs\|dTs\|dTs\|5mCs\|dGs\|dTs\|dAs\|dTs\|dTs\|dTs\|o5mCp\|oTs\|oTs\|oGs\|o5mCs\|oAs\|oA] |
| 1596 | [oGs\|oTs\|oAp\|oTs\|oTs\|dTs\|dTs\|dTs\|5mCs\|dGs\|dTs\|dAs\|dTs\|dTs\|dTs\|o5mCp\|oTp\|oTs\|oGs\|o5mCs\|oAs\|oA] |
| 1597 | [oGs\|oTs\|oAs\|oTp\|oTs\|dTs\|dTs\|dTs\|5mCs\|dGs\|dTs\|dAs\|dTs\|dTs\|dTs\|o5mCp\|oTp\|oTs\|oGs\|o5mCs\|oAs\|oA] |
| 1598 | [oGs\|oTs\|oAp\|oTp\|oTs\|dTs\|dTs\|dTs\|5mCs\|dGs\|dTs\|dAs\|dTs\|dTs\|dTs\|o5mCs\|oTp\|oTs\|oGs\|o5mCs\|oAs\|oA] |
| 1599 | [oGs\|oTs\|oAp\|oTp\|oTs\|dTs\|dTs\|dTs\|5mCs\|dGs\|dTs\|dAs\|dTs\|dTs\|dTs\|o5mCp\|oTs\|oTs\|oGs\|o5mCs\|oAs\|oA] |
| 1600 | [oGs\|oTs\|oAp\|oTp\|oTs\|dTs\|dTs\|dTs\|5mCs\|dGs\|dTs\|dAs\|dTs\|dTs\|dTs\|o5mCp\|oTp\|oTs\|oGs\|o5mCs\|oAs\|oA] |
| 1601 | [oGs\|oTs\|oAs\|oTs\|oTs\|dTs\|dTs\|dTs\|5mCs\|dGs\|dTs\|dAs\|dTs\|dTs\|dTs\|o5mCs\|oTs\|oTs\|oGs\|o5mCs\|oAs\|oAs\|oA] |
| 1602 | [oGs\|oTs\|oAp\|oTs\|oTs\|dTs\|dTs\|dTs\|5mCs\|dGs\|dTs\|dAs\|dTs\|dTs\|dTs\|o5mCs\|oTs\|oTs\|oGs\|o5mCs\|oAs\|oAs\|oA] |
| 1603 | [oGs\|oTs\|oAs\|oTp\|oTs\|dTs\|dTs\|dTs\|5mCs\|dGs\|dTs\|dAs\|dTs\|dTs\|dTs\|o5mCs\|oTs\|oTs\|oGs\|o5mCs\|oAs\|oAs\|oA] |
| 1604 | [oGs\|oTs\|oAp\|oTp\|oTs\|dTs\|dTs\|dTs\|5mCs\|dGs\|dTs\|dAs\|dTs\|dTs\|dTs\|o5mCs\|oTs\|oTs\|oGs\|o5mCs\|oAs\|oAs\|oA] |
| 1605 | [oGs\|oTs\|oAs\|oTs\|oTs\|dTs\|dTs\|dTs\|5mCs\|dGs\|dTs\|dAs\|dTs\|dTs\|dTs\|o5mCs\|oTp\|oTs\|oGs\|o5mCs\|oAs\|oAs\|oA] |
| 1606 | [oGs\|oTs\|oAs\|oTs\|oTs\|dTs\|dTs\|dTs\|5mCs\|dGs\|dTs\|dAs\|dTs\|dTs\|dTs\|o5mCp\|oTs\|oTs\|oGs\|o5mCs\|oAs\|oAs\|oA] |
| 1607 | [oGs\|oTs\|oAs\|oTs\|oTs\|dTs\|dTs\|dTs\|5mCs\|dGs\|dTs\|dAs\|dTs\|dTs\|dTs\|o5mCp\|oTp\|oTs\|oGs\|o5mCs\|oAs\|oAs\|oA] |
| 1608 | [oGs\|oTs\|oAp\|oTs\|oTs\|dTs\|dTs\|dTs\|5mCs\|dGs\|dTs\|dAs\|dTs\|dTs\|dTs\|o5mCs\|oTp\|oTs\|oGs\|o5mCs\|oAs\|oAs\|oA] |
| 1609 | [oGs\|oTs\|oAp\|oTs\|oTs\|dTs\|dTs\|dTs\|5mCs\|dGs\|dTs\|dAs\|dTs\|dTs\|dTs\|o5mCp\|oTs\|oTs\|oGs\|o5mCs\|oAs\|oAs\|oA] |
| 1610 | [oGs\|oTs\|oAs\|oTp\|oTs\|dTs\|dTs\|dTs\|5mCs\|dGs\|dTs\|dAs\|dTs\|dTs\|dTs\|o5mCs\|oTp\|oTs\|oGs\|o5mCs\|oAs\|oAs\|oA] |
| 1611 | [oGs\|oTs\|oAs\|oTp\|oTs\|dTs\|dTs\|dTs\|5mCs\|dGs\|dTs\|dAs\|dTs\|dTs\|dTs\|o5mCp\|oTs\|oTs\|oGs\|o5mCs\|oAs\|oAs\|oA] |
| 1612 | [oGs\|oTs\|oAp\|oTs\|oTs\|dTs\|dTs\|dTs\|5mCs\|dGs\|dTs\|dAs\|dTs\|dTs\|dTs\|o5mCp\|oTp\|oTs\|oGs\|o5mCs\|oAs\|oAs\|oA] |
| 1613 | [oGs\|oTs\|oAs\|oTp\|oTs\|dTs\|dTs\|dTs\|5mCs\|dGs\|dTs\|dAs\|dTs\|dTs\|dTs\|o5mCp\|oTp\|oTs\|oGs\|o5mCs\|oAs\|oAs\|oA] |
| 1614 | [oGs\|oTs\|oAp\|oTp\|oTs\|dTs\|dTs\|dTs\|5mCs\|dGs\|dTs\|dAs\|dTs\|dTs\|dTs\|o5mCs\|oTp\|oTs\|oGs\|o5mCs\|oAs\|oAs\|oA] |
| 1615 | [oGs\|oTs\|oAp\|oTp\|oTs\|dTs\|dTs\|dTs\|5mCs\|dGs\|dTs\|dAs\|dTs\|dTs\|dTs\|o5mCp\|oTs\|oTs\|oGs\|o5mCs\|oAs\|oAs\|oA] |
| 1616 | [oGs\|oTs\|oAp\|oTp\|oTs\|dTs\|dTs\|dTs\|5mCs\|dGs\|dTs\|dAs\|dTs\|dTs\|dTs\|o5mCp\|oTp\|oTs\|oGs\|o5mCs\|oAs\|oAs\|oA] |
| 1617 | [oGs\|oTs\|oAs\|oTs\|oTs\|dTs\|dTs\|dTs\|5mCs\|dGs\|dTs\|dAs\|dTs\|dTs\|dTs\|5mCs\|oTs\|oTs\|oGs\|o5mCs\|oA] |
| 1618 | [oGs\|oTs\|oAp\|oTs\|oTs\|dTs\|dTs\|dTs\|5mCs\|dGs\|dTs\|dAs\|dTs\|dTs\|dTs\|5mCs\|oTs\|oTs\|oGs\|o5mCs\|oA] |
| 1619 | [oGs\|oTs\|oAs\|oTp\|oTs\|dTs\|dTs\|dTs\|5mCs\|dGs\|dTs\|dAs\|dTs\|dTs\|dTs\|5mCs\|oTs\|oTs\|oGs\|o5mCs\|oA] |
| 1620 | [oGs\|oTs\|oAp\|oTp\|oTs\|dTs\|dTs\|dTs\|5mCs\|dGs\|dTs\|dAs\|dTs\|dTs\|dTs\|5mCs\|oTs\|oTs\|oGs\|o5mCs\|oA] |
| 1621 | [oGs\|oTs\|oAs\|oTs\|oTs\|dTs\|dTs\|dTs\|5mCs\|dGs\|dTs\|dAs\|dTs\|dTs\|dTs\|5mCs\|oTp\|oTs\|oGs\|o5mCs\|oA] |
| 1622 | [oGs\|oTs\|oAs\|oTs\|oTs\|dTs\|dTs\|dTs\|5mCs\|dGs\|dTs\|dAs\|dTs\|dTs\|dTs\|5mCp\|oTs\|oTs\|oGs\|o5mCs\|oA] |
| 1623 | [oGs\|oTs\|oAs\|oTs\|oTs\|dTs\|dTs\|dTs\|5mCs\|dGs\|dTs\|dAs\|dTs\|dTs\|dTs\|5mCp\|oTp\|oTs\|oGs\|o5mCs\|oA] |
| 1624 | [oGs\|oTs\|oAp\|oTs\|oTs\|dTs\|dTs\|dTs\|5mCs\|dGs\|dTs\|dAs\|dTs\|dTs\|dTs\|5mCs\|oTp\|oTs\|oGs\|o5mCs\|oA] |
| 1625 | [oGs\|oTs\|oAp\|oTs\|oTs\|dTs\|dTs\|dTs\|5mCs\|dGs\|dTs\|dAs\|dTs\|dTs\|dTs\|5mCp\|oTs\|oTs\|oGs\|o5mCs\|oA] |
| 1626 | [oGs\|oTs\|oAs\|oTp\|oTs\|dTs\|dTs\|dTs\|5mCs\|dGs\|dTs\|dAs\|dTs\|dTs\|dTs\|5mCs\|oTp\|oTs\|oGs\|o5mCs\|oA] |
| 1627 | [oGs\|oTs\|oAs\|oTp\|oTs\|dTs\|dTs\|dTs\|5mCs\|dGs\|dTs\|dAs\|dTs\|dTs\|dTs\|5mCp\|oTs\|oTs\|oGs\|o5mCs\|oA] |
| 1628 | [oGs\|oTs\|oAp\|oTs\|oTs\|dTs\|dTs\|dTs\|5mCs\|dGs\|dTs\|dAs\|dTs\|dTs\|dTs\|5mCp\|oTp\|oTs\|oGs\|o5mCs\|oA] |
| 1629 | [oGs\|oTs\|oAs\|oTp\|oTs\|dTs\|dTs\|dTs\|5mCs\|dGs\|dTs\|dAs\|dTs\|dTs\|dTs\|5mCp\|oTp\|oTs\|oGs\|o5mCs\|oA] |
| 1630 | [oGs\|oTs\|oAp\|oTp\|oTs\|dTs\|dTs\|dTs\|5mCs\|dGs\|dTs\|dAs\|dTs\|dTs\|dTs\|5mCs\|oTp\|oTs\|oGs\|o5mCs\|oA] |
| 1631 | [oGs\|oTs\|oAp\|oTp\|oTs\|dTs\|dTs\|dTs\|5mCs\|dGs\|dTs\|dAs\|dTs\|dTs\|dTs\|5mCp\|oTs\|oTs\|oGs\|o5mCs\|oA] |
| 1632 | [oGs\|oTs\|oAp\|oTp\|oTs\|dTs\|dTs\|dTs\|5mCs\|dGs\|dTs\|dAs\|dTs\|dTs\|dTs\|5mCp\|oTp\|oTs\|oGs\|o5mCs\|oA] |
| 1633 | [oGs\|oTs\|oAs\|oTs\|oTs\|dTs\|dTs\|dTs\|5mCs\|dGs\|dTs\|dAs\|dTs\|dTs\|dTs\|5mCs\|dTs\|oTs\|oGs\|o5mCs\|oAs\|oA] |
| 1634 | [oGs\|oTs\|oAp\|oTs\|oTs\|dTs\|dTs\|dTs\|5mCs\|dGs\|dTs\|dAs\|dTs\|dTs\|dTs\|5mCs\|dTs\|oTs\|oGs\|o5mCs\|oAs\|oA] |
| 1635 | [oGs\|oTs\|oAs\|oTp\|oTs\|dTs\|dTs\|dTs\|5mCs\|dGs\|dTs\|dAs\|dTs\|dTs\|dTs\|5mCs\|dTs\|oTs\|oGs\|o5mCs\|oAs\|oA] |
| 1636 | [oGs\|oTs\|oAp\|oTp\|oTs\|dTs\|dTs\|dTs\|5mCs\|dGs\|dTs\|dAs\|dTs\|dTs\|dTs\|5mCs\|dTs\|oTs\|oGs\|o5mCs\|oAs\|oA] |
| 1637 | [oGs\|oTs\|oAs\|oTs\|oTs\|dTs\|dTs\|dTs\|5mCs\|dGs\|dTs\|dAs\|dTs\|dTs\|dTs\|5mCs\|dTp\|oTs\|oGs\|o5mCs\|oAs\|oA] |
| 1638 | [oGs\|oTs\|oAs\|oTs\|oTs\|dTs\|dTs\|dTs\|5mCs\|dGs\|dTs\|dAs\|dTs\|dTs\|dTs\|5mCp\|dTs\|oTs\|oGs\|o5mCs\|oAs\|oA] |
| 1639 | [oGs\|oTs\|oAs\|oTs\|oTs\|dTs\|dTs\|dTs\|5mCs\|dGs\|dTs\|dAs\|dTs\|dTs\|dTs\|5mCp\|dTp\|oTs\|oGs\|o5mCs\|oAs\|oA] |
| 1640 | [oGs\|oTs\|oAp\|oTs\|oTs\|dTs\|dTs\|dTs\|5mCs\|dGs\|dTs\|dAs\|dTs\|dTs\|dTs\|5mCs\|dTp\|oTs\|oGs\|o5mCs\|oAs\|oA] |
| 1641 | [oGs\|oTs\|oAp\|oTs\|oTs\|dTs\|dTs\|dTs\|5mCs\|dGs\|dTs\|dAs\|dTs\|dTs\|dTs\|5mCp\|dTs\|oTs\|oGs\|o5mCs\|oAs\|oA] |
| 1642 | [oGs\|oTs\|oAs\|oTp\|oTs\|dTs\|dTs\|dTs\|5mCs\|dGs\|dTs\|dAs\|dTs\|dTs\|dTs\|5mCs\|dTp\|oTs\|oGs\|o5mCs\|oAs\|oA] |
| 1643 | [oGs\|oTs\|oAs\|oTp\|oTs\|dTs\|dTs\|dTs\|5mCs\|dGs\|dTs\|dAs\|dTs\|dTs\|dTs\|5mCp\|dTs\|oTs\|oGs\|o5mCs\|oAs\|oA] |
| 1644 | [oGs\|oTs\|oAp\|oTs\|oTs\|dTs\|dTs\|dTs\|5mCs\|dGs\|dTs\|dAs\|dTs\|dTs\|dTs\|5mCp\|dTp\|oTs\|oGs\|o5mCs\|oAs\|oA] |
| 1645 | [oGs\|oTs\|oAs\|oTp\|oTs\|dTs\|dTs\|dTs\|5mCs\|dGs\|dTs\|dAs\|dTs\|dTs\|dTs\|5mCp\|dTp\|oTs\|oGs\|o5mCs\|oAs\|oA] |
| 1646 | [oGs\|oTs\|oAp\|oTp\|oTs\|dTs\|dTs\|dTs\|5mCs\|dGs\|dTs\|dAs\|dTs\|dTs\|dTs\|5mCs\|dTp\|oTs\|oGs\|o5mCs\|oAs\|oA] |
| 1647 | [oGs\|oTs\|oAp\|oTp\|oTs\|dTs\|dTs\|dTs\|5mCs\|dGs\|dTs\|dAs\|dTs\|dTs\|dTs\|5mCp\|dTs\|oTs\|oGs\|o5mCs\|oAs\|oA] |
| 1648 | [oGs\|oTs\|oAp\|oTp\|oTs\|dTs\|dTs\|dTs\|5mCs\|dGs\|dTs\|dAs\|dTs\|dTs\|dTs\|5mCp\|dTp\|oTs\|oGs\|o5mCs\|oAs\|oA] |
| 1649 | [o5mCs\|LTs\|oAs\|oGs\|oGs\|oTs\|oGs\|oAs\|dTs\|dGs\|5mCs\|dAs\|5mCs\|dTs\|dGs\|5mCs\|dTs\|dTs\|oTs\|oA] |
| 1650 | [o5mCs\|oTs\|LAs\|oGs\|oGs\|oTs\|oGs\|oAs\|dTs\|dGs\|5mCs\|dAs\|5mCs\|dTs\|dGs\|5mCs\|dTs\|dTs\|oTs\|oA] |
| 1651 | [o5mCs\|oTs\|oAs\|LGs\|oGs\|oTs\|oGs\|oAs\|dTs\|dGs\|5mCs\|dAs\|5mCs\|dTs\|dGs\|5mCs\|dTs\|dTs\|oTs\|oA] |
| 1652 | [o5mCs\|oTs\|oAs\|oGs\|LGs\|oTs\|oGs\|oAs\|dTs\|dGs\|5mCs\|dAs\|5mCs\|dTs\|dGs\|5mCs\|dTs\|dTs\|oTs\|oA] |
| 1653 | [o5mCs\|oTs\|oAs\|oGs\|oGs\|LTs\|oGs\|oAs\|dTs\|dGs\|5mCs\|dAs\|5mCs\|dTs\|dGs\|5mCs\|dTs\|dTs\|oTs\|oA] |
| 1654 | [o5mCs\|oTs\|oAs\|oGs\|oGs\|oTs\|LGs\|oAs\|dTs\|dGs\|5mCs\|dAs\|5mCs\|dTs\|dGs\|5mCs\|dTs\|dTs\|oTs\|oA] |
| 1655 | [o5mCs\|oTs\|dAs\|dGs\|dGs\|dTs\|dGs\|dAs\|dTs\|dGs\|5mCs\|dAs\|o5mCs\|oTs\|oGs\|o5mCs\|oTs\|oTs\|LTs\|oA] |
| 1656 | [o5mCs\|oTs\|dAs\|dGs\|dGs\|dTs\|dGs\|dAs\|dTs\|dGs\|5mCs\|dAs\|o5mCs\|oTs\|oGs\|o5mCs\|oTs\|LTs\|oTs\|oA] |
| 1657 | [o5mCs\|oTs\|dAs\|dGs\|dGs\|dTs\|dGs\|dAs\|dTs\|dGs\|5mCs\|dAs\|o5mCs\|oTs\|oGs\|o5mCs\|LTs\|oTs\|oTs\|oA] |
| 1658 | [o5mCs\|oTs\|dAs\|dGs\|dGs\|dTs\|dGs\|dAs\|dTs\|dGs\|5mCs\|dAs\|o5mCs\|oTs\|oGs\|L5mCs\|oTs\|oTs\|oTs\|oA] |
| 1659 | [o5mCs\|oTs\|dAs\|dGs\|dGs\|dTs\|dGs\|dAs\|dTs\|dGs\|5mCs\|dAs\|o5mCs\|oTs\|LGs\|o5mCs\|oTs\|oTs\|oTs\|oA] |
| 1660 | [o5mCs\|oTs\|dAs\|dGs\|dGs\|dTs\|dGs\|dAs\|dTs\|dGs\|5mCs\|dAs\|o5mCs\|LTs\|oGs\|o5mCs\|oTs\|oTs\|oTs\|oA] |
| 1661 | [o5mCs\|LTs\|oAs\|oGs\|oGs\|oTs\|oGs\|dAs\|dTs\|dGs\|5mCs\|dAs\|5mCs\|dTs\|dGs\|5mCs\|dTs\|oTs\|oTs\|oA] |
| 1662 | [o5mCs\|oTs\|LAs\|oGs\|oGs\|oTs\|oGs\|dAs\|dTs\|dGs\|5mCs\|dAs\|5mCs\|dTs\|dGs\|5mCs\|dTs\|oTs\|oTs\|oA] |
| 1663 | [o5mCs\|oTs\|oAs\|LGs\|oGs\|oTs\|oGs\|dAs\|dTs\|dGs\|5mCs\|dAs\|5mCs\|dTs\|dGs\|5mCs\|dTs\|oTs\|oTs\|oA] |
| 1664 | [o5mCs\|oTs\|oAs\|oGs\|LGs\|oTs\|oGs\|dAs\|dTs\|dGs\|5mCs\|dAs\|5mCs\|dTs\|dGs\|5mCs\|dTs\|oTs\|oTs\|oA] |
| 1665 | [o5mCs\|oTs\|oAs\|oGs\|oGs\|LTs\|oGs\|dAs\|dTs\|dGs\|5mCs\|dAs\|5mCs\|dTs\|dGs\|5mCs\|dTs\|oTs\|oTs\|oA] |
| 1666 | [o5mCs\|oTs\|oAs\|dGs\|dGs\|dTs\|dGs\|dAs\|dTs\|dGs\|5mCs\|dAs\|5mCs\|oTs\|oGs\|o5mCs\|oTs\|oTs\|LTs\|oA] |
| 1667 | [o5mCs\|oTs\|oAs\|dGs\|dGs\|dTs\|dGs\|dAs\|dTs\|dGs\|5mCs\|dAs\|5mCs\|oTs\|oGs\|o5mCs\|oTs\|LTs\|oTs\|oA] |
| 1668 | [o5mCs\|oTs\|oAs\|dGs\|dGs\|dTs\|dGs\|dAs\|dTs\|dGs\|5mCs\|dAs\|5mCs\|oTs\|oGs\|o5mCs\|LTs\|oTs\|oTs\|oA] |
| 1669 | [o5mCs\|oTs\|oAs\|dGs\|dGs\|dTs\|dGs\|dAs\|dTs\|dGs\|5mCs\|dAs\|5mCs\|oTs\|oGs\|L5mCs\|oTs\|oTs\|oTs\|oA] |
| 1670 | [o5mCs\|oTs\|oAs\|dGs\|dGs\|dTs\|dGs\|dAs\|dTs\|dGs\|5mCs\|dAs\|5mCs\|oTs\|LGs\|o5mCs\|oTs\|oTs\|oTs\|oA] |
| 1671 | [o5mCs\|LTs\|oAs\|oGs\|oGs\|oTs\|oGs\|dAs\|dTs\|dGs\|5mCs\|dAs\|5mCs\|dTs\|dGs\|5mCs\|dTs\|oTs\|oT] |
| 1672 | [o5mCs\|oTs\|LAs\|oGs\|oGs\|oTs\|oGs\|dAs\|dTs\|dGs\|5mCs\|dAs\|5mCs\|dTs\|dGs\|5mCs\|dTs\|oTs\|oT] |
| 1673 | [o5mCs\|oTs\|oAs\|LGs\|oGs\|oTs\|oGs\|dAs\|dTs\|dGs\|5mCs\|dAs\|5mCs\|dTs\|dGs\|5mCs\|dTs\|oTs\|oT] |
| 1674 | [o5mCs\|oTs\|oAs\|oGs\|LGs\|oTs\|oGs\|dAs\|dTs\|dGs\|5mCs\|dAs\|5mCs\|dTs\|dGs\|5mCs\|dTs\|oTs\|oT] |
| 1675 | [o5mCs\|oTs\|oAs\|oGs\|oGs\|LTs\|oGs\|dAs\|dTs\|dGs\|5mCs\|dAs\|5mCs\|dTs\|dGs\|5mCs\|dTs\|oTs\|oT] |
| 1676 | [oTs\|oAs\|dGs\|dGs\|dTs\|dGs\|dAs\|dTs\|dGs\|5mCs\|dAs\|5mCs\|oTs\|oGs\|o5mCs\|oTs\|oTsILTs\|oA] |
| 1677 | [oTs\|oAs\|dGs\|dGs\|dTs\|dGs\|dAs\|dTs\|dGs\|5mCs\|dAs\|5mCs\|oTs\|oGs\|o5mCs\|oTs\|LTs\|oTs\|oA] |
| 1678 | [oTs\|oAs\|dGs\|dGs\|dTs\|dGs\|dAs\|dTs\|dGs\|5mCs\|dAs\|5mCs\|oTs\|oGs\|o5mCs\|LTs\|oTs\|oTs\|oA] |
| 1679 | [oTs\|oAs\|dGs\|dGs\|dTs\|dGs\|dAs\|dTs\|dGs\|5mCs\|dAs\|5mCs\|oTs\|oGs\|L5mCs\|oTs\|oTs\|oTs\|oA] |
| 1680 | [oTs\|oAs\|dGs\|dGs\|dTs\|dGs\|dAs\|dTs\|dGs\|5mCs\|dAs\|5mCs\|oTs\|LGs\|o5mCs\|oTs\|oTs\|oTs\|oA] |
| 1681 | [o5mCs\|LTs\|oAs\|oGs\|oGs\|oTs\|dGs\|dAs\|dTs\|dGs\|5mCs\|dAs\|5mCs\|dTs\|dGs\|5mCs\|oTs\|oTs\|oTs\|oA] |
| 1682 | [o5mCs\|oTs\|LAs\|oGs\|oGs\|oTs\|dGs\|dAs\|dTs\|dGs\|5mCs\|dAs\|5mCs\|dTs\|dGs\|5mCs\|oTs\|oTs\|oTs\|oA] |
| 1683 | [o5mCs\|oTs\|oAs\|LGs\|oGs\|oTs\|dGs\|dAs\|dTs\|dGs\|5mCs\|dAs\|5mCs\|dTs\|dGs\|5mCs\|oTs\|oTs\|oTs\|oA] |
| 1684 | [o5mCs\|oTs\|oAs\|oGs\|LGs\|oTs\|dGs\|dAs\|dTs\|dGs\|5mCs\|dAs\|5mCs\|dTs\|dGs\|5mCs\|oTs\|oTs\|oTs\|oA] |
| 1685 | [o5mCs\|oTs\|oAs\|oGs\|dGs\|dTs\|dGs\|dAs\|dTs\|dGs\|5mCs\|dAs\|5mCs\|dTs\|oGs\|o5mCs\|oTs\|oTs\|LTs\|oA] |
| 1686 | [o5mCs\|oTs\|oAs\|oGs\|dGs\|dTs\|dGs\|dAs\|dTs\|dGs\|5mCs\|dAs\|5mCs\|dTs\|oGs\|o5mCs\|oTs\|LTs\|oTs\|oA] |
| 1687 | [o5mCs\|oTs\|oAs\|oGs\|dGs\|dTs\|dGs\|dAs\|dTs\|dGs\|5mCs\|dAs\|5mCs\|dTs\|oGs\|o5mCs\|LTs\|oTs\|oTs\|oA] |
| 1688 | [o5mCs\|oTs\|oAs\|oGs\|dGs\|dTs\|dGs\|dAs\|dTs\|dGs\|5mCs\|dAs\|5mCs\|dTs\|oGs\|L5mCs\|oTs\|oTs\|oTs\|oA] |
| 1689 | [o5mCs\|LTs\|oAs\|oGs\|oGs\|oTs\|dGs\|dAs\|dTs\|dGs\|5mCs\|dAs\|5mCs\|dTs\|dGs\|5mCs\|oTs\|oTs\|oT] |
| 1690 | [o5mCs\|oTs\|LAs\|oGs\|oGs\|oTs\|dGs\|dAs\|dTs\|dGs\|5mCs\|dAs\|5mCs\|dTs\|dGs\|5mCs\|oTs\|oTs\|oT] |
| 1691 | [o5mCs\|oTs\|oAs\|LGs\|oGs\|oTs\|dGs\|dAs\|dTs\|dGs\|5mCs\|dAs\|5mCs\|dTs\|dGs\|5mCs\|oTs\|oTs\|oT] |
| 1692 | [o5mCs\|oTs\|oAs\|oGs\|LGs\|oTs\|dGs\|dAs\|dTs\|dGs\|5mCs\|dAs\|5mCs\|dTs\|dGs\|5mCs\|oTs\|oTs\|oT] |
| 1693 | [o5mCs\|oTs\|oAs\|dGs\|dGs\|dTs\|dGs\|dAs\|dTs\|dGs\|5mCs\|dAs\|5mCs\|dTs\|oGs\|o5mCs\|oTs\|oTs\|LTs\|oA] |
| 1694 | [o5mCs\|oTs\|oAs\|dGs\|dGs\|dTs\|dGs\|dAs\|dTs\|dGs\|5mCs\|dAs\|5mCs\|dTs\|oGs\|o5mCs\|oTs\|LTs\|oTs\|oA] |
| 1695 | [o5mCs\|oTs\|oAs\|dGs\|dGs\|dTs\|dGs\|dAs\|dTs\|dGs\|5mCs\|dAs\|5mCs\|dTs\|oGs\|o5mCs\|LTs\|oTs\|oTs\|oA] |
| 1696 | [o5mCs\|LTs\|oAs\|oGs\|oGs\|oTs\|dGs\|dAs\|dTs\|dGs\|5mCs\|dAs\|5mCs\|dTs\|dGs\|5mCs\|oTs\|oT] |
| 1697 | [o5mCs\|oTs\|LAs\|oGs\|oGs\|oTs\|dGs\|dAs\|dTs\|dGs\|5mCs\|dAs\|5mCs\|dTs\|dGs\|5mCs\|oTs\|oT] |
| 1698 | [o5mCs\|oTs\|oAs\|LGs\|oGs\|oTs\|dGs\|dAs\|dTs\|dGs\|5mCs\|dAs\|5mCs\|dTs\|dGs\|5mCs\|oTs\|oT] |
| 1699 | [o5mCs\|oTs\|oAs\|oGs\|LGs\|oTs\|dGs\|dAs\|dTs\|dGs\|5mCs\|dAs\|5mCs\|dTs\|dGs\|5mCs\|oTs\|oT] |
| 1700 | [oAs\|oGs\|dGs\|dTs\|dGs\|dAs\|dTs\|dGs\|5mCs\|dAs\|5mCs\|dTs\|oGs\|o5mCs\|oTs\|oTs\|LTs\|oA] |
| 1701 | [oAs\|oGs\|dGs\|dTs\|dGs\|dAs\|dTs\|dGs\|5mCs\|dAs\|5mCs\|dTs\|oGs\|o5mCs\|oTs\|LTs\|oTs\|oA] |
| 1702 | [oAs\|oGs\|dGs\|dTs\|dGs\|dAs\|dTs\|dGs\|5mCs\|dAs\|5mCs\|dTs\|oGs\|o5mCs\|LTs\|oTs\|oTs\|oA] |
| 1703 | [oAs\|oGs\|dGs\|dTs\|dGs\|dAs\|dTs\|dGs\|5mCs\|dAs\|5mCs\|dTs\|oGs\|L5mCs\|oTs\|oTs\|oTs\|oA] |
| 1704 | [o5mCs\|LTs\|oAs\|oGs\|oGs\|dTs\|dGs\|dAs\|dTs\|dGs\|5mCs\|dAs\|5mCs\|dTs\|dGs\|o5mCs\|oTs\|oTs\|oTs\|oA] |
| 1705 | [o5mCs\|oTs\|LAs\|oGs\|oGs\|dTs\|dGs\|dAs\|dTs\|dGs\|5mCs\|dAs\|5mCs\|dTs\|dGs\|o5mCs\|oTs\|oTs\|oTs\|oA] |
| 1706 | [o5mCs\|oTs\|oAs\|LGs\|oGs\|dTs\|dGs\|dAs\|dTs\|dGs\|5mCs\|dAs\|5mCs\|dTs\|dGs\|o5mCs\|oTs\|oTs\|oTs\|oA] |
| 1707 | [o5mCs\|oTs\|oAs\|oGs\|oGs\|dTs\|dGs\|dAs\|dTs\|dGs\|5mCs\|dAs\|5mCs\|dTs\|dGs\|o5mCs\|oTs\|oTs\|LTs\|oA] |
| 1708 | [o5mCs\|oTs\|oAs\|oGs\|oGs\|dTs\|dGs\|dAs\|dTs\|dGs\|5mCs\|dAs\|5mCs\|dTs\|dGs\|o5mCs\|oTs\|LTs\|oTs\|oA] |
| 1709 | [o5mCs\|oTs\|oAs\|oGs\|oGs\|dTs\|dGs\|dAs\|dTs\|dGs\|5mCs\|dAs\|5mCs\|dTs\|dGs\|o5mCs\|LTs\|oTs\|oTs\|oA] |
| 1710 | [o5mCs\|LTs\|oAs\|oGs\|oGs\|dTs\|dGs\|dAs\|dTs\|dGs\|5mCs\|dAs\|5mCs\|dTs\|dGs\|o5mCs\|oTs\|oTs\|oT] |
| 1711 | [o5mCs\|oTs\|LAs\|oGs\|oGs\|dTs\|dGs\|dAs\|dTs\|dGs\|5mCs\|dAs\|5mCs\|dTs\|dGs\|o5mCs\|oTs\|oTs\|oT] |
| 1712 | [o5mCs\|oTs\|oAs\|LGs\|oGs\|dTs\|dGs\|dAs\|dTs\|dGs\|5mCs\|dAs\|5mCs\|dTs\|dGs\|o5mCs\|oTs\|oTs\|oT] |
| 1713 | [oTs\|oAs\|oGs\|oGs\|dTs\|dGs\|dAs\|dTs\|dGs\|5mCs\|dAs\|5mCs\|dTs\|dGs\|o5mCs\|oTs\|oTs\|LTs\|oA] |
| 1714 | [oTs\|oAs\|oGs\|oGs\|dTs\|dGs\|dAs\|dTs\|dGs\|5mCs\|dAs\|5mCs\|dTs\|dGs\|o5mCs\|oTs\|LTs\|oTs\|oA] |
| 1715 | [oTs\|oAs\|oGs\|oGs\|dTs\|dGs\|dAs\|dTs\|dGs\|5mCs\|dAs\|5mCs\|dTs\|dGs\|o5mCs\|LTs\|oTs\|oTs\|oA] |
| 1716 | [o5mCs\|LTs\|oAs\|oGs\|oGs\|dTs\|dGs\|dAs\|dTs\|dGs\|5mCs\|dAs\|5mCs\|dTs\|dGs\|o5mCs\|oTs\|oT] |
| 1717 | [o5mCs\|oTs\|LAs\|oGs\|oGs\|dTs\|dGs\|dAs\|dTs\|dGs\|5mCs\|dAs\|5mCs\|dTs\|dGs\|o5mCs\|oTs\|oT] |
| 1718 | [o5mCs\|oTs\|oAs\|LGs\|oGs\|dTs\|dGs\|dAs\|dTs\|dGs\|5mCs\|dAs\|5mCs\|dTs\|dGs\|o5mCs\|oTs\|oT] |
| 1719 | [oAs\|oGs\|oGs\|dTs\|dGs\|dAs\|dTs\|dGs\|5mCs\|dAs\|5mCs\|dTs\|dGs\|o5mCs\|oTs\|oTs\|LTs\|oA] |
| 1720 | [oAs\|oGs\|oGs\|dTs\|dGs\|dAs\|dTs\|dGs\|5mCs\|dAs\|5mCs\|dTs\|dGs\|o5mCs\|oTs\|LTs\|oTs\|oA] |
| 1721 | [oAs\|oGs\|oGs\|dTs\|dGs\|dAs\|dTs\|dGs\|5mCs\|dAs\|5mCs\|dTs\|dGs\|o5mCs\|LTs\|oTs\|oTs\|oA] |
| 1722 | [o5mCs\|LTs\|oAs\|oGs\|oGs\|dTs\|dGs\|dAs\|dTs\|dGs\|5mCs\|dAs\|5mCs\|dTs\|dGs\|o5mCs\|oT] |
| 1723 | [o5mCs\|oTs\|LAs\|oGs\|oGs\|dTs\|dGs\|dAs\|dTs\|dGs\|5mCs\|dAs\|5mCs\|dTs\|dGs\|o5mCs\|oT] |
| 1724 | [o5mCs\|oTs\|oAs\|LGs\|oGs\|dTs\|dGs\|dAs\|dTs\|dGs\|5mCs\|dAs\|5mCs\|dTs\|dGs\|o5mCs\|oT] |
| 1725 | [oGs\|oGs\|dTs\|dGs\|dAs\|dTs\|dGs\|5mCs\|dAs\|5mCs\|dTs\|dGs\|o5mCs\|oTs\|oTs\|LTs\|oA] |
| 1726 | [oGs\|oGs\|dTs\|dGs\|dAs\|dTs\|dGs\|5mCs\|dAs\|5mCs\|dTs\|dGs\|o5mCs\|oTs\|LTs\|oTs\|oA] |
| 1727 | [oGs\|oGs\|dTs\|dGs\|dAs\|dTs\|dGs\|5mCs\|dAs\|5mCs\|dTs\|dGs\|o5mCs\|LTs\|oTs\|oTs\|oA] |
| 1728 | [oTs\|LAs\|oGs\|oGs\|dTs\|dGs\|dAs\|dTs\|dGs\|5mCs\|dAs\|5mCs\|dTs\|dGs\|o5mCs\|oTs\|oTs\|oTs\|oA] |
| 1729 | [oTs\|oAs\|LGs\|oGs\|dTs\|dGs\|dAs\|dTs\|dGs\|5mCs\|dAs\|5mCs\|dTs\|dGs\|o5mCs\|oTs\|oTs\|oTs\|oA] |
| 1730 | [o5mCs\|oTs\|oAs\|oGs\|oGs\|dTs\|dGs\|dAs\|dTs\|dGs\|5mCs\|dAs\|5mCs\|dTs\|dGs\|o5mCs\|oTs\|LTs\|oT] |
| 1731 | [o5mCs\|oTs\|oAs\|oGs\|oGs\|dTs\|dGs\|dAs\|dTs\|dGs\|5mCs\|dAs\|5mCs\|dTs\|dGs\|o5mCs\|LTs\|oTs\|oT] |
| 1732 | [oTs\|LAs\|oGs\|oGs\|dTs\|dGs\|dAs\|dTs\|dGs\|5mCs\|dAs\|5mCs\|dTs\|dGs\|o5mCs\|oTs\|oTs\|oT] |
| 1733 | [oTs\|oAs\|LGs\|oGs\|dTs\|dGs\|dAs\|dTs\|dGs\|5mCs\|dAs\|5mCs\|dTs\|dGs\|o5mCs\|oTs\|oTs\|oT] |
| 1734 | [oTs\|oAs\|oGs\|oGs\|dTs\|dGs\|dAs\|dTs\|dGs\|5mCs\|dAs\|5mCs\|dTs\|dGs\|o5mCs\|oTs\|LTs\|oT] |
| 1735 | [oTs\|oAs\|oGs\|oGs\|dTs\|dGs\|dAs\|dTs\|dGs\|5mCs\|dAs\|5mCs\|dTs\|dGs\|o5mCs\|LTs\|oTs\|oT] |
| 1736 | [oTs\|LAs\|oGs\|oGs\|dTs\|dGs\|dAs\|dTs\|dGs\|5mCs\|dAs\|5mCs\|dTs\|dGs\|o5mCs\|oTs\|oT] |
| 1737 | [oTs\|oAs\|LGs\|oGs\|dTs\|dGs\|dAs\|dTs\|dGs\|5mCs\|dAs\|5mCs\|dTs\|dGs\|o5mCs\|oTs\|oT] |
| 1738 | [oTs\|oAs\|oGs\|oGs\|dTs\|dGs\|dAs\|dTs\|dGs\|5mCs\|dAs\|5mCs\|dTs\|dGs\|o5mCs\|LTs\|oT] |
| 1739 | [o5mCs\|oTs\|oAs\|oGs\|oGs\|oTs\|oGs\|oAs\|dTs\|dGs\|5mCs\|dAs\|5mCs\|dTs\|dGs\|5mCs\|dTs\|dTs\|oTs\|oA] |
| 1740 | [o5mCs\|oTs\|dAs\|dGs\|dGs\|dTs\|dGs\|dAs\|dTs\|dGs\|5mCs\|dAs\|o5mCs\|oTs\|oGs\|o5mCs\|oTs\|oTs\|oTs\|oA] |
| 1741 | [o5mCs\|oTs\|oAs\|oGs\|oGs\|oTs\|oGs\|dAs\|dTs\|dGs\|5mCs\|dAs\|5mCs\|dTs\|dGs\|5mCs\|dTs\|oTs\|oTs\|oA] |
| 1742 | [o5mCs\|oTs\|oAs\|dGs\|dGs\|dTs\|dGs\|dAs\|dTs\|dGs\|5mCs\|dAs\|5mCs\|oTs\|oGs\|o5mCs\|oTs\|oTs\|oTs\|oA] |
| 1743 | [o5mCs\|oTs\|oAs\|oGs\|oGs\|oTs\|oGs\|dAs\|dTs\|dGs\|5mCs\|dAs\|5mCs\|dTs\|dGs\|5mCs\|dTs\|oTs\|oT] |
| 1744 | [oTs\|oAs\|dGs\|dGs\|dTs\|dGs\|dAs\|dTs\|dGs\|5mCs\|dAs\|5mCs\|oTs\|oGs\|o5mCs\|oTs\|oTs\|oTs\|oA] |
| 1745 | [o5mCs\|oTs\|oAs\|oGs\|oGs\|oTs\|dGs\|dAs\|dTs\|dGs\|5mCs\|dAs\|5mCs\|dTs\|dGs\|5mCs\|oTs\|oTs\|oTs\|oA] |
| 1746 | [o5mCs\|oTs\|oAs\|oGs\|dGs\|dTs\|dGs\|dAs\|dTs\|dGs\|5mCs\|dAs\|5mCs\|dTs\|oGs\|o5mCs\|oTs\|oTs\|oTs\|oA] |
| 1747 | [o5mCs\|oTs\|oAs\|oGs\|oGs\|oTs\|dGs\|dAs\|dTs\|dGs\|5mCs\|dAs\|5mCs\|dTs\|dGs\|5mCs\|oTs\|oTs\|oT] |
| 1748 | [o5mCs\|oTs\|oAs\|dGs\|dGs\|dTs\|dGs\|dAs\|dTs\|dGs\|5mCs\|dAs\|5mCs\|dTs\|oGs\|o5mCs\|oTs\|oTs\|oTs\|oA] |
| 1749 | [o5mCs\|oTs\|oAs\|oGs\|oGs\|oTs\|dGs\|dAs\|dTs\|dGs\|5mCs\|dAs\|5mCs\|dTs\|dGs\|5mCs\|oTs\|oT] |
| 1750 | [oAs\|oGs\|dGs\|dTs\|dGs\|dAs\|dTs\|dGs\|5mCs\|dAs\|5mCs\|dTs\|oGs\|o5mCs\|oTs\|oTs\|oTs\|oA] |
| 1751 | [o5mCs\|oTs\|oAs\|oGs\|oGs\|dTs\|dGs\|dAs\|dTs\|dGs\|5mCs\|dAs\|5mCs\|dTs\|dGs\|o5mCs\|oTs\|oTs\|oTs\|oA] |
| 1752 | [o5mCs\|oTs\|oAs\|oGs\|oGs\|dTs\|dGs\|dAs\|dTs\|dGs\|5mCs\|dAs\|5mCs\|dTs\|dGs\|o5mCs\|oTs\|oTs\|oT] |
| 1753 | [o5mCs\|oTs\|oAs\|oGs\|oGs\|dTs\|dGs\|dAs\|dTs\|dGs\|5mCs\|dAs\|5mCs\|dTs\|dGs\|o5mCs\|oTs\|oT] |
| 1754 | [oAs\|oGs\|oGs\|dTs\|dGs\|dAs\|dTs\|dGs\|5mCs\|dAs\|5mCs\|dTs\|dGs\|o5mCs\|oTs\|oTs\|oTs\|oA] |
| 1755 | [o5mCs\|oTs\|oAs\|oGs\|oGs\|dTs\|dGs\|dAs\|dTs\|dGs\|5mCs\|dAs\|5mCs\|dTs\|dGs\|o5mCs\|oT] |
| 1756 | [oGs\|oGs\|dTs\|dGs\|dAs\|dTs\|dGs\|5mCs\|dAs\|5mCs\|dTs\|dGs\|o5mCs\|oTs\|oTs\|oTs\|oA] |
| 1757 | [oTs\|oAs\|oGs\|oGs\|dTs\|dGs\|dAs\|dTs\|dGs\|5mCs\|dAs\|5mCs\|dTs\|dGs\|o5mCs\|oTs\|oTs\|oTs\|oA] |
| 1758 | [oTs\|oAs\|oGs\|oGs\|dTs\|dGs\|dAs\|dTs\|dGs\|5mCs\|dAs\|5mCs\|dTs\|dGs\|o5mCs\|oTs\|oTs\|oT] |
| 1759 | [oTs\|oAs\|oGs\|oGs\|dTs\|dGs\|dAs\|dTs\|dGs\|5mCs\|dAs\|5mCs\|dTs\|dGs\|o5mCs\|oTs\|oT] |
| 1760 | [o5mCs\|oTs\|oAp\|oGs\|oGs\|dTs\|dGs\|dAs\|dTs\|dGs\|5mCs\|dAs\|5mCs\|dTs\|dGs\|o5mCs\|oTs\|oTs\|oTs\|oA] |
| 1761 | [o5mCs\|oTs\|oAs\|oGp\|oGs\|dTs\|dGs\|dAs\|dTs\|dGs\|5mCs\|dAs\|5mCs\|dTs\|dGs\|o5mCs\|oTs\|oTs\|oTs\|oA] |
| 1762 | [o5mCs\|oTs\|oAp\|oGp\|oGs\|dTs\|dGs\|dAs\|dTs\|dGs\|5mCs\|dAs\|5mCs\|dTs\|dGs\|o5mCs\|oTs\|oTs\|oTs\|oA] |
| 1763 | [o5mCs\|oTs\|oAs\|oGs\|oGs\|dTs\|dGs\|dAs\|dTs\|dGs\|5mCs\|dAs\|5mCs\|dTs\|dGs\|o5mCs\|oTp\|oTs\|oTs\|oA] |
| 1764 | [o5mCs\|oTs\|oAs\|oGs\|oGs\|dTs\|dGs\|dAs\|dTs\|dGs\|5mCs\|dAs\|5mCs\|dTs\|dGs\|o5mCp\|oTs\|oTs\|oTs\|oA] |
| 1765 | [o5mCs\|oTs\|oAs\|oGs\|oGs\|dTs\|dGs\|dAs\|dTs\|dGs\|5mCs\|dAs\|5mCs\|dTs\|dGs\|o5mCp\|oTp\|oTs\|oTs\|oA] |
| 1766 | [o5mCs\|oTs\|oAp\|oGs\|oGs\|dTs\|dGs\|dAs\|dTs\|dGs\|5mCs\|dAs\|5mCs\|dTs\|dGs\|o5mCs\|oTp\|oTs\|oTs\|oA] |
| 1767 | [o5mCs\|oTs\|oAp\|oGs\|oGs\|dTs\|dGs\|dAs\|dTs\|dGs\|5mCs\|dAs\|5mCs\|dTs\|dGs\|o5mCp\|oTs\|oTs\|oTs\|oA] |
| 1768 | [o5mCs\|oTs\|oAs\|oGp\|oGs\|dTs\|dGs\|dAs\|dTs\|dGs\|5mCs\|dAs\|5mCs\|dTs\|dGs\|o5mCs\|oTp\|oTs\|oTs\|oA] |
| 1769 | [o5mCs\|oTs\|oAs\|oGp\|oGs\|dTs\|dGs\|dAs\|dTs\|dGs\|5mCs\|dAs\|5mCs\|dTs\|dGs\|o5mCp\|oTs\|oTs\|oTs\|oA] |
| 1770 | [o5mCs\|oTs\|oAp\|oGs\|oGs\|dTs\|dGs\|dAs\|dTs\|dGs\|5mCs\|dAs\|5mCs\|dTs\|dGs\|o5mCp\|oTp\|oTs\|oTs\|oA] |
| 1771 | [o5mCs\|oTs\|oAs\|oGp\|oGs\|dTs\|dGs\|dAs\|dTs\|dGs\|5mCs\|dAs\|5mCs\|dTs\|dGs\|o5mCp\|oTp\|oTs\|oTs\|oA] |
| 1772 | [o5mCs\|oTs\|oAp\|oGp\|oGs\|dTs\|dGs\|dAs\|dTs\|dGs\|5mCs\|dAs\|5mCs\|dTs\|dGs\|o5mCs\|oTp\|oTs\|oTs\|oA] |
| 1773 | [o5mCs\|oTs\|oAp\|oGp\|oGs\|dTs\|dGs\|dAs\|dTs\|dGs\|5mCs\|dAs\|5mCs\|dTs\|dGs\|o5mCp\|oTs\|oTs\|oTs\|oA] |
| 1774 | [o5mCs\|oTs\|oAp\|oGp\|oGs\|dTs\|dGs\|dAs\|dTs\|dGs\|5mCs\|dAs\|5mCs\|dTs\|dGs\|o5mCp\|oTp\|oTs\|oTs\|oA] |
| 1775 | [o5mCs\|oTs\|oAs\|oGs\|oGs\|dTs\|dGs\|dAs\|dTs\|dGs\|5mCs\|dAs\|5mCs\|dTs\|dGs\|o5mCs\|oTs\|oTs\|oTs\|oAs\|o5mC] |
| 1776 | [o5mCs\|oTs\|oAp\|oGs\|oGs\|dTs\|dGs\|dAs\|dTs\|dGs\|5mCs\|dAs\|5mCs\|dTs\|dGs\|o5mCs\|oTs\|oTs\|oTs\|oAs\|o5mC] |
| 1777 | [o5mCs\|oTs\|oAs\|oGp\|oGs\|dTs\|dGs\|dAs\|dTs\|dGs\|5mCs\|dAs\|5mCs\|dTs\|dGs\|o5mCs\|oTs\|oTs\|oTs\|oAs\|o5mC] |
| 1778 | [o5mCs\|oTs\|oAp\|oGp\|oGs\|dTs\|dGs\|dAs\|dTs\|dGs\|5mCs\|dAs\|5mCs\|dTs\|dGs\|o5mCs\|oTs\|oTs\|oTs\|oAs\|o5mC] |
| 1779 | [o5mCs\|oTs\|oAs\|oGs\|oGs\|dTs\|dGs\|dAs\|dTs\|dGs\|5mCs\|dAs\|5mCs\|dTs\|dGs\|o5mCs\|oTp\|oTs\|oTs\|oAs\|o5mC] |
| 1780 | [o5mCs\|oTs\|oAs\|oGs\|oGs\|dTs\|dGs\|dAs\|dTs\|dGs\|5mCs\|dAs\|5mCs\|dTs\|dGs\|o5mCp\|oTs\|oTs\|oTs\|oAs\|o5mC] |
| 1781 | [o5mCs\|oTs\|oAs\|oGs\|oGs\|dTs\|dGs\|dAs\|dTs\|dGs\|5mCs\|dAs\|5mCs\|dTs\|dGs\|o5mCp\|oTp\|oTs\|oTs\|oAs\|o5mC] |
| 1782 | [o5mCs\|oTs\|oAp\|oGs\|oGs\|dTs\|dGs\|dAs\|dTs\|dGs\|5mCs\|dAs\|5mCs\|dTs\|dGs\|o5mCs\|oTp\|oTs\|oTs\|oAs\|o5mC] |
| 1783 | [o5mCs\|oTs\|oAp\|oGs\|oGs\|dTs\|dGs\|dAs\|dTs\|dGs\|5mCs\|dAs\|5mCs\|dTs\|dGs\|o5mCp\|oTs\|oTs\|oTs\|oAs\|o5mC] |
| 1784 | [o5mCs\|oTs\|oAs\|oGp\|oGs\|dTs\|dGs\|dAs\|dTs\|dGs\|5mCs\|dAs\|5mCs\|dTs\|dGs\|o5mCs\|oTp\|oTs\|oTs\|oAs\|o5mC] |
| 1785 | [o5mCs\|oTs\|oAs\|oGp\|oGs\|dTs\|dGs\|dAs\|dTs\|dGs\|5mCs\|dAs\|5mCs\|dTs\|dGs\|o5mCp\|oTs\|oTs\|oTs\|oAs\|o5mC] |
| 1786 | [o5mCs\|oTs\|oAp\|oGs\|oGs\|dTs\|dGs\|dAs\|dTs\|dGs\|5mCs\|dAs\|5mCs\|dTs\|dGs\|o5mCp\|oTp\|oTs\|oTs\|oAs\|o5mC] |
| 1787 | [o5mCs\|oTs\|oAs\|oGp\|oGs\|dTs\|dGs\|dAs\|dTs\|dGs\|5mCs\|dAs\|5mCs\|dTs\|dGs\|o5mCp\|oTp\|oTs\|oTs\|oAs\|o5mC] |
| 1788 | [o5mCs\|oTs\|oAp\|oGp\|oGs\|dTs\|dGs\|dAs\|dTs\|dGs\|5mCs\|dAs\|5mCs\|dTs\|dGs\|o5mCs\|oTp\|oTs\|oTs\|oAs\|o5mC] |
| 1789 | [o5mCs\|oTs\|oAp\|oGp\|oGs\|dTs\|dGs\|dAs\|dTs\|dGs\|5mCs\|dAs\|5mCs\|dTs\|dGs\|o5mCp\|oTs\|oTs\|oTs\|oAs\|o5mC] |
| 1790 | [o5mCs\|oTs\|oAp\|oGp\|oGs\|dTs\|dGs\|dAs\|dTs\|dGs\|5mCs\|dAs\|5mCs\|dTs\|dGs\|o5mCp\|oTp\|oTs\|oTs\|oAs\|o5mC] |
| 1791 | [o5mCs\|oTs\|oAs\|oGs\|oGs\|dTs\|dGs\|dAs\|dTs\|dGs\|5mCs\|dAs\|5mCs\|dTs\|dGs\|o5mCs\|oTs\|oTs\|oTs\|oAs\|o5mCs\|oA] |
| 1792 | [o5mCs\|oTs\|oAp\|oGs\|oGs\|dTs\|dGs\|dAs\|dTs\|dGs\|5mCs\|dAs\|5mCs\|dTs\|dGs\|o5mCs\|oTs\|oTs\|oTs\|oAs\|o5mCs\|oA] |
| 1793 | [o5mCs\|oTs\|oAs\|oGp\|oGs\|dTs\|dGs\|dAs\|dTs\|dGs\|5mCs\|dAs\|5mCs\|dTs\|dGs\|o5mCs\|oTs\|oTs\|oTs\|oAs\|o5mCs\|oA] |
| 1794 | [o5mCs\|oTs\|oAp\|oGp\|oGs\|dTs\|dGs\|dAs\|dTs\|dGs\|5mCs\|dAs\|5mCs\|dTs\|dGs\|o5mCs\|oTs\|oTs\|oTs\|oAs\|o5mCs\|oA] |
| 1795 | [o5mCs\|oTs\|oAs\|oGs\|oGs\|dTs\|dGs\|dAs\|dTs\|dGs\|5mCs\|dAs\|5mCs\|dTs\|dGs\|o5mCs\|oTp\|oTs\|oTs\|oAs\|o5mCs\|oA] |
| 1796 | [o5mCs\|oTs\|oAs\|oGs\|oGs\|dTs\|dGs\|dAs\|dTs\|dGs\|5mCs\|dAs\|5mCs\|dTs\|dGs\|o5mCp\|oTs\|oTs\|oTs\|oAs\|o5mCs\|oA] |
| 1797 | [o5mCs\|oTs\|oAs\|oGs\|oGs\|dTs\|dGs\|dAs\|dTs\|dGs\|5mCs\|dAs\|5mCs\|dTs\|dGs\|o5mCp\|oTp\|oTs\|oTs\|oAs\|o5mCs\|oA] |
| 1798 | [o5mCs\|oTs\|oAp\|oGs\|oGs\|dTs\|dGs\|dAs\|dTs\|dGs\|5mCs\|dAs\|5mCs\|dTs\|dGs\|o5mCs\|oTp\|oTs\|oTs\|oAs\|o5mCs\|oA] |
| 1799 | [o5mCs\|oTs\|oAp\|oGs\|oGs\|dTs\|dGs\|dAs\|dTs\|dGs\|5mCs\|dAs\|5mCs\|dTs\|dGs\|o5mCp\|oTs\|oTs\|oTs\|oAs\|o5mCs\|oA] |
| 1800 | [o5mCs\|oTs\|oAs\|oGp\|oGs\|dTs\|dGs\|dAs\|dTs\|dGs\|5mCs\|dAs\|5mCs\|dTs\|dGs\|o5mCs\|oTp\|oTs\|oTs\|oAs\|o5mCs\|oA] |
| 1801 | [o5mCs\|oTs\|oAs\|oGp\|oGs\|dTs\|dGs\|dAs\|dTs\|dGs\|5mCs\|dAs\|5mCs\|dTs\|dGs\|o5mCp\|oTs\|oTs\|oTs\|oAs\|o5mCs\|oA] |
| 1802 | [o5mCs\|oTs\|oAp\|oGs\|oGs\|dTs\|dGs\|dAs\|dTs\|dGs\|5mCs\|dAs\|5mCs\|dTs\|dGs\|o5mCp\|oTp\|oTs\|oTs\|oAs\|o5mCs\|oA] |
| 1803 | [o5mCs\|oTs\|oAs\|oGp\|oGs\|dTs\|dGs\|dAs\|dTs\|dGs\|5mCs\|dAs\|5mCs\|dTs\|dGs\|o5mCp\|oTp\|oTs\|oTs\|oAs\|o5mCs\|oA] |
| 1804 | [o5mCs\|oTs\|oAp\|oGp\|oGs\|dTs\|dGs\|dAs\|dTs\|dGs\|5mCs\|dAs\|5mCs\|dTs\|dGs\|o5mCs\|oTp\|oTs\|oTs\|oAs\|o5mCs\|oA] |
| 1805 | [o5mCs\|oTs\|oAp\|oGp\|oGs\|dTs\|dGs\|dAs\|dTs\|dGs\|5mCs\|dAs\|5mCs\|dTs\|dGs\|o5mCp\|oTs\|oTs\|oTs\|oAs\|o5mCs\|oA] |
| 1806 | [o5mCs\|oTs\|oAp\|oGp\|oGs\|dTs\|dGs\|dAs\|dTs\|dGs\|5mCs\|dAs\|5mCs\|dTs\|dGs\|o5mCp\|oTp\|oTs\|oTs\|oAs\|o5mCs\|oA] |
| 1807 | [o5mCs\|oTs\|oAs\|oGs\|oGs\|dTs\|dGs\|dAs\|dTs\|dGs\|5mCs\|dAs\|5mCs\|dTs\|dGs\|o5mCs\|oTs\|oTs\|oTs\|oAs\|o5mCs\|oAs\|o5mC] |
| 1808 | [o5mCs\|oTs\|oAp\|oGs\|oGs\|dTs\|dGs\|dAs\|dTs\|dGs\|5mCs\|dAs\|5mCs\|dTs\|dGs\|o5mCs\|oTs\|oTs\|oTs\|oAs\|o5mCs\|oAs\|o5mC] |
| 1809 | [o5mCs\|oTs\|oAs\|oGp\|oGs\|dTs\|dGs\|dAs\|dTs\|dGs\|5mCs\|dAs\|5mCs\|dTs\|dGs\|o5mCs\|oTs\|oTs\|oTs\|oAs\|o5mCs\|oAs\|o5mC] |
| 1810 | [o5mCs\|oTs\|oAp\|oGp\|oGs\|dTs\|dGs\|dAs\|dTs\|dGs\|5mCs\|dAs\|5mCs\|dTs\|dGs\|o5mCs\|oTs\|oTs\|oTs\|oAs\|o5mCs\|oAs\|o5mC] |
| 1811 | [o5mCs\|oTs\|oAs\|oGs\|oGs\|dTs\|dGs\|dAs\|dTs\|dGs\|5mCs\|dAs\|5mCs\|dTs\|dGs\|o5mCs\|oTp\|oTs\|oTs\|oAs\|o5mCs\|oAs\|o5mC] |
| 1812 | [o5mCs\|oTs\|oAs\|oGs\|oGs\|dTs\|dGs\|dAs\|dTs\|dGs\|5mCs\|dAs\|5mCs\|dTs\|dGs\|o5mCp\|oTs\|oTs\|oTs\|oAs\|o5mCs\|oAs\|o5mC] |
| 1813 | [o5mCs\|oTs\|oAs\|oGs\|oGs\|dTs\|dGs\|dAs\|dTs\|dGs\|5mCs\|dAs\|5mCs\|dTs\|dGs\|o5mCp\|oTp\|oTs\|oTs\|oAs\|o5mCs\|oAs\|o5mC] |
| 1814 | [o5mCs\|oTs\|oAp\|oGs\|oGs\|dTs\|dGs\|dAs\|dTs\|dGs\|5mCs\|dAs\|5mCs\|dTs\|dGs\|o5mCs\|oTp\|oTs\|oTs\|oAs\|o5mCs\|oAs\|o5mC] |
| 1815 | [o5mCs\|oTs\|oAp\|oGs\|oGs\|dTs\|dGs\|dAs\|dTs\|dGs\|5mCs\|dAs\|5mCs\|dTs\|dGs\|o5mCp\|oTs\|oTs\|oTs\|oAs\|o5mCs\|oAs\|o5mC] |
| 1816 | [o5mCs\|oTs\|oAs\|oGp\|oGs\|dTs\|dGs\|dAs\|dTs\|dGs\|5mCs\|dAs\|5mCs\|dTs\|dGs\|o5mCs\|oTp\|oTs\|oTs\|oAs\|o5mCs\|oAs\|o5mC] |
| 1817 | [o5mCs\|oTs\|oAs\|oGp\|oGs\|dTs\|dGs\|dAs\|dTs\|dGs\|5mCs\|dAs\|5mCs\|dTs\|dGs\|o5mCp\|oTs\|oTs\|oTs\|oAs\|o5mCs\|oAs\|o5mC] |
| 1818 | [o5mCs\|oTs\|oAp\|oGs\|oGs\|dTs\|dGs\|dAs\|dTs\|dGs\|5mCs\|dAs\|5mCs\|dTs\|dGs\|o5mCp\|oTp\|oTs\|oTs\|oAs\|o5mCs\|oAs\|o5mC] |
| 1819 | [o5mCs\|oTs\|oAs\|oGp\|oGs\|dTs\|dGs\|dAs\|dTs\|dGs\|5mCs\|dAs\|5mCs\|dTs\|dGs\|o5mCp\|oTp\|oTs\|oTs\|oAs\|o5mCs\|oAs\|o5mC] |
| 1820 | [o5mCs\|oTs\|oAp\|oGp\|oGs\|dTs\|dGs\|dAs\|dTs\|dGs\|5mCs\|dAs\|5mCs\|dTs\|dGs\|o5mCs\|oTp\|oTs\|oTs\|oAs\|o5mCs\|oAs\|o5mC] |
| 1821 | [o5mCs\|oTs\|oAp\|oGp\|oGs\|dTs\|dGs\|dAs\|dTs\|dGs\|5mCs\|dAs\|5mCs\|dTs\|dGs\|o5mCp\|oTs\|oTs\|oTs\|oAs\|o5mCs\|oAs\|o5mC] |
| 1822 | [o5mCs\|oTs\|oAp\|oGp\|oGs\|dTs\|dGs\|dAs\|dTs\|dGs\|5mCs\|dAs\|5mCs\|dTs\|dGs\|o5mCp\|oTp\|oTs\|oTs\|oAs\|o5mCs\|oAs\|o5mC] |
| 1823 | [o5mCs\|oTs\|oAs\|oGs\|oGs\|dTs\|dGs\|dAs\|dTs\|dGs\|5mCs\|dAs\|5mCs\|dTs\|dGs\|5mCs\|oTs\|oTs\|oTs\|oAs\|o5mC] |
| 1824 | [o5mCs\|oTs\|oAp\|oGs\|oGs\|dTs\|dGs\|dAs\|dTs\|dGs\|5mCs\|dAs\|5mCs\|dTs\|dGs\|5mCs\|oTs\|oTs\|oTs\|oAs\|o5mC] |
| 1825 | [o5mCs\|oTs\|oAs\|oGp\|oGs\|dTs\|dGs\|dAs\|dTs\|dGs\|5mCs\|dAs\|5mCs\|dTs\|dGs\|5mCs\|oTs\|oTs\|oTs\|oAs\|o5mC] |
| 1826 | [o5mCs\|oTs\|oAp\|oGp\|oGs\|dTs\|dGs\|dAs\|dTs\|dGs\|5mCs\|dAs\|5mCs\|dTs\|dGs\|5mCs\|oTs\|oTs\|oTs\|oAs\|o5mC] |
| 1827 | [o5mCs\|oTs\|oAs\|oGs\|oGs\|dTs\|dGs\|dAs\|dTs\|dGs\|5mCs\|dAs\|5mCs\|dTs\|dGs\|5mCs\|oTp\|oTs\|oTs\|oAs\|o5mC] |
| 1828 | [o5mCs\|oTs\|oAs\|oGs\|oGs\|dTs\|dGs\|dAs\|dTs\|dGs\|5mCs\|dAs\|5mCs\|dTs\|dGs\|5mCp\|oTs\|oTs\|oTs\|oAs\|o5mC] |
| 1829 | [o5mCs\|oTs\|oAs\|oGs\|oGs\|dTs\|dGs\|dAs\|dTs\|dGs\|5mCs\|dAs\|5mCs\|dTs\|dGs\|5mCp\|oTp\|oTs\|oTs\|oAs\|o5mC] |
| 1830 | [o5mCs\|oTs\|oAp\|oGs\|oGs\|dTs\|dGs\|dAs\|dTs\|dGs\|5mCs\|dAs\|5mCs\|dTs\|dGs\|5mCs\|oTp\|oTs\|oTs\|oAs\|o5mC] |
| 1831 | [o5mCs\|oTs\|oAp\|oGs\|oGs\|dTs\|dGs\|dAs\|dTs\|dGs\|5mCs\|dAs\|5mCs\|dTs\|dGs\|5mCp\|oTs\|oTs\|oTs\|oAs\|o5mC] |
| 1832 | [o5mCs\|oTs\|oAs\|oGp\|oGs\|dTs\|dGs\|dAs\|dTs\|dGs\|5mCs\|dAs\|5mCs\|dTs\|dGs\|5mCs\|oTp\|oTs\|oTs\|oAs\|o5mC] |
| 1833 | [o5mCs\|oTs\|oAs\|oGp\|oGs\|dTs\|dGs\|dAs\|dTs\|dGs\|5mCs\|dAs\|5mCs\|dTs\|dGs\|5mCp\|oTs\|oTs\|oTs\|oAs\|o5mC] |
| 1834 | [o5mCs\|oTs\|oAp\|oGs\|oGs\|dTs\|dGs\|dAs\|dTs\|dGs\|5mCs\|dAs\|5mCs\|dTs\|dGs\|5mCp\|oTp\|oTs\|oTs\|oAs\|o5mC] |
| 1835 | [o5mCs\|oTs\|oAs\|oGp\|oGs\|dTs\|dGs\|dAs\|dTs\|dGs\|5mCs\|dAs\|5mCs\|dTs\|dGs\|5mCp\|oTp\|oTs\|oTs\|oAs\|o5mC] |
| 1836 | [o5mCs\|oTs\|oAp\|oGp\|oGs\|dTs\|dGs\|dAs\|dTs\|dGs\|5mCs\|dAs\|5mCs\|dTs\|dGs\|5mCs\|oTp\|oTs\|oTs\|oAs\|o5mC] |
| 1837 | [o5mCs\|oTs\|oAp\|oGp\|oGs\|dTs\|dGs\|dAs\|dTs\|dGs\|5mCs\|dAs\|5mCs\|dTs\|dGs\|5mCp\|oTs\|oTs\|oTs\|oAs\|o5mC] |
| 1838 | [o5mCs\|oTs\|oAp\|oGp\|oGs\|dTs\|dGs\|dAs\|dTs\|dGs\|5mCs\|dAs\|5mCs\|dTs\|dGs\|5mCp\|oTp\|oTs\|oTs\|oAs\|o5mC] |
| 1839 | [o5mCs\|oTs\|oAs\|oGs\|oGs\|dTs\|dGs\|dAs\|dTs\|dGs\|5mCs\|dAs\|5mCs\|dTs\|dGs\|5mCs\|dTs\|oTs\|oTs\|oAs\|o5mCs\|oA] |
| 1840 | [o5mCs\|oTs\|oAp\|oGs\|oGs\|dTs\|dGs\|dAs\|dTs\|dGs\|5mCs\|dAs\|5mCs\|dTs\|dGs\|5mCs\|dTs\|oTs\|oTs\|oAs\|o5mCs\|oA] |
| 1841 | [o5mCs\|oTs\|oAs\|oGp\|oGs\|dTs\|dGs\|dAs\|dTs\|dGs\|5mCs\|dAs\|5mCs\|dTs\|dGs\|5mCs\|dTs\|oTs\|oTs\|oAs\|o5mCs\|oA] |
| 1842 | [o5mCs\|oTs\|oAp\|oGp\|oGs\|dTs\|dGs\|dAs\|dTs\|dGs\|5mCs\|dAs\|5mCs\|dTs\|dGs\|5mCs\|dTs\|oTs\|oTs\|oAs\|o5mCs\|oA] |
| 1843 | [o5mCs\|oTs\|oAs\|oGs\|oGs\|dTs\|dGs\|dAs\|dTs\|dGs\|5mCs\|dAs\|5mCs\|dTs\|dGs\|5mCs\|dTp\|oTs\|oTs\|oAs\|o5mCs\|oA] |
| 1844 | [o5mCs\|oTs\|oAs\|oGs\|oGs\|dTs\|dGs\|dAs\|dTs\|dGs\|5mCs\|dAs\|5mCs\|dTs\|dGs\|5mCp\|dTs\|oTs\|oTs\|oAs\|o5mCs\|oA] |
| 1845 | [o5mCs\|oTs\|oAs\|oGs\|oGs\|dTs\|dGs\|dAs\|dTs\|dGs\|5mCs\|dAs\|5mCs\|dTs\|dGs\|5mCp\|dTp\|oTs\|oTs\|oAs\|o5mCs\|oA] |
| 1846 | [o5mCs\|oTs\|oAp\|oGs\|oGs\|dTs\|dGs\|dAs\|dTs\|dGs\|5mCs\|dAs\|5mCs\|dTs\|dGs\|5mCs\|dTp\|oTs\|oTs\|oAs\|o5mCs\|oA] |
| 1847 | [o5mCs\|oTs\|oAp\|oGs\|oGs\|dTs\|dGs\|dAs\|dTs\|dGs\|5mCs\|dAs\|5mCs\|dTs\|dGs\|5mCp\|dTs\|oTs\|oTs\|oAs\|o5mCs\|oA] |
| 1848 | [o5mCs\|oTs\|oAs\|oGp\|oGs\|dTs\|dGs\|dAs\|dTs\|dGs\|5mCs\|dAs\|5mCs\|dTs\|dGs\|5mCs\|dTp\|oTs\|oTs\|oAs\|o5mCs\|oA] |
| 1849 | [o5mCs\|oTs\|oAs\|oGp\|oGs\|dTs\|dGs\|dAs\|dTs\|dGs\|5mCs\|dAs\|5mCs\|dTs\|dGs\|5mCp\|dTs\|oTs\|oTs\|oAs\|o5mCs\|oA] |
| 1850 | [o5mCs\|oTs\|oAp\|oGs\|oGs\|dTs\|dGs\|dAs\|dTs\|dGs\|5mCs\|dAs\|5mCs\|dTs\|dGs\|5mCp\|dTp\|oTs\|oTs\|oAs\|o5mCs\|oA] |
| 1851 | [o5mCs\|oTs\|oAs\|oGp\|oGs\|dTs\|dGs\|dAs\|dTs\|dGs\|5mCs\|dAs\|5mCs\|dTs\|dGs\|5mCp\|dTp\|oTs\|oTs\|oAs\|o5mCs\|oA] |
| 1852 | [o5mCs\|oTs\|oAp\|oGp\|oGs\|dTs\|dGs\|dAs\|dTs\|dGs\|5mCs\|dAs\|5mCs\|dTs\|dGs\|5mCs\|dTp\|oTs\|oTs\|oAs\|o5mCs\|oA] |
| 1853 | [o5mCs\|oTs\|oAp\|oGp\|oGs\|dTs\|dGs\|dAs\|dTs\|dGs\|5mCs\|dAs\|5mCs\|dTs\|dGs\|5mCp\|dTs\|oTs\|oTs\|oAs\|o5mCs\|oA] |
| 1854 | [o5mCs\|oTs\|oAp\|oGp\|oGs\|dTs\|dGs\|dAs\|dTs\|dGs\|5mCs\|dAs\|5mCs\|dTs\|dGs\|5mCp\|dTp\|oTs\|oTs\|oAs\|o5mCs\|oA] |
| 1855 | [oGs\|L5mCs\|oTs\|oAs\|oGs\|oGs\|oTs\|oGs\|dAs\|dTs\|dGs\|5mCs\|dAs\|5mCs\|dTs\|dGs\|5mCs\|dTs\|oTs\|oT] |
| 1856 | [oGs\|o5mCs\|LTs\|oAs\|oGs\|oGs\|oTs\|oGs\|dAs\|dTs\|dGs\|5mCs\|dAs\|5mCs\|dTs\|dGs\|5mCs\|dTs\|oTs\|oT] |
| 1857 | [oGs\|o5mCs\|oTs\|LAs\|oGs\|oGs\|oTs\|oGs\|dAs\|dTs\|dGs\|5mCs\|dAs\|5mCs\|dTs\|dGs\|5mCs\|dTs\|oTs\|oT] |
| 1858 | [oGs\|o5mCs\|oTs\|oAs\|LGs\|oGs\|oTs\|oGs\|dAs\|dTs\|dGs\|5mCs\|dAs\|5mCs\|dTs\|dGs\|5mCs\|dTs\|oTs\|oT] |
| 1859 | [oGs\|o5mCs\|oTs\|oAs\|oGs\|LGs\|oTs\|oGs\|dAs\|dTs\|dGs\|5mCs\|dAs\|5mCs\|dTs\|dGs\|5mCs\|dTs\|oTs\|oT] |
| 1860 | [oGs\|o5mCs\|oTs\|oAs\|oGs\|oGs\|LTs\|oGs\|dAs\|dTs\|dGs\|5mCs\|dAs\|5mCs\|dTs\|dGs\|5mCs\|dTs\|oTs\|oT] |
| 1861 | [oGs\|o5mCs\|dTs\|dAs\|dGs\|dGs\|dTs\|dGs\|dAs\|dTs\|dGs\|5mCs\|oAs\|o5mCs\|oTs\|oGs\|o5mCs\|oTs\|LTs\|oT] |
| 1862 | [oGs\|o5mCs\|dTs\|dAs\|dGs\|dGs\|dTs\|dGs\|dAs\|dTs\|dGs\|5mCs\|oAs\|o5mCs\|oTs\|oGs\|o5mCs\|LTs\|oTs\|oT] |
| 1863 | [oGs\|o5mCs\|dTs\|dAs\|dGs\|dGs\|dTs\|dGs\|dAs\|dTs\|dGs\|5mCs\|oAs\|o5mCs\|oTs\|oGs\|L5mCs\|oTs\|oTs\|oT] |
| 1864 | [oGs\|o5mCs\|dTs\|dAs\|dGs\|dGs\|dTs\|dGs\|dAs\|dTs\|dGs\|5mCs\|oAs\|o5mCs\|oTs\|LGs\|o5mCs\|oTs\|oTs\|oT] |
| 1865 | [oGs\|o5mCs\|dTs\|dAs\|dGs\|dGs\|dTs\|dGs\|dAs\|dTs\|dGs\|5mCs\|oAs\|o5mCs\|LTs\|oGs\|o5mCs\|oTs\|oTs\|oT] |
| 1866 | [oGs\|o5mCs\|dTs\|dAs\|dGs\|dGs\|dTs\|dGs\|dAs\|dTs\|dGs\|5mCs\|oAs\|L5mCs\|oTs\|oGs\|o5mCs\|oTs\|oTs\|oT] |
| 1867 | [oGs\|L5mCs\|oTs\|oAs\|oGs\|oGs\|oTs\|dGs\|dAs\|dTs\|dGs\|5mCs\|dAs\|5mCs\|dTs\|dGs\|5mCs\|oTs\|oTs\|oT] |
| 1868 | [oGs\|o5mCs\|LTs\|oAs\|oGs\|oGs\|oTs\|dGs\|dAs\|dTs\|dGs\|5mCs\|dAs\|5mCs\|dTs\|dGs\|5mCs\|oTs\|oTs\|oT] |
| 1869 | [oGs\|o5mCs\|oTs\|LAs\|oGs\|oGs\|oTs\|dGs\|dAs\|dTs\|dGs\|5mCs\|dAs\|5mCs\|dTs\|dGs\|5mCs\|oTs\|oTs\|oT] |
| 1870 | [oGs\|o5mCs\|oTs\|oAs\|LGs\|oGs\|oTs\|dGs\|dAs\|dTs\|dGs\|5mCs\|dAs\|5mCs\|dTs\|dGs\|5mCs\|oTs\|oTs\|oT] |
| 1871 | [oGs\|o5mCs\|oTs\|oAs\|oGs\|LGs\|oTs\|dGs\|dAs\|dTs\|dGs\|5mCs\|dAs\|5mCs\|dTs\|dGs\|5mCs\|oTs\|oTs\|oT] |
| 1872 | [oGs\|o5mCs\|oTs\|dAs\|dGs\|dGs\|dTs\|dGs\|dAs\|dTs\|dGs\|5mCs\|dAs\|o5mCs\|oTs\|oGs\|o5mCs\|oTs\|LTs\|oT] |
| 1873 | [oGs\|o5mCs\|oTs\|dAs\|dGs\|dGs\|dTs\|dGs\|dAs\|dTs\|dGs\|5mCs\|dAs\|o5mCs\|oTs\|oGs\|o5mCs\|LTs\|oTs\|oT] |
| 1874 | [oGs\|o5mCs\|oTs\|dAs\|dGs\|dGs\|dTs\|dGs\|dAs\|dTs\|dGs\|5mCs\|dAs\|o5mCs\|oTs\|oGs\|L5mCs\|oTs\|oTs\|oT] |
| 1875 | [oGs\|o5mCs\|oTs\|dAs\|dGs\|dGs\|dTs\|dGs\|dAs\|dTs\|dGs\|5mCs\|dAs\|o5mCs\|oTs\|LGs\|o5mCs\|oTs\|oTs\|oT] |
| 1876 | [oGs\|o5mCs\|oTs\|dAs\|dGs\|dGs\|dTs\|dGs\|dAs\|dTs\|dGs\|5mCs\|dAs\|o5mCs\|LTs\|oGs\|o5mCs\|oTs\|oTs\|oT] |
| 1877 | [oGs\|L5mCs\|oTs\|oAs\|oGs\|oGs\|oTs\|dGs\|dAs\|dTs\|dGs\|5mCs\|dAs\|5mCs\|dTs\|dGs\|5mCs\|oTs\|oT] |
| 1878 | [oGs\|o5mCs\|LTs\|oAs\|oGs\|oGs\|oTs\|dGs\|dAs\|dTs\|dGs\|5mCs\|dAs\|5mCs\|dTs\|dGs\|5mCs\|oTs\|oT] |
| 1879 | [oGs\|o5mCs\|oTs\|LAs\|oGs\|oGs\|oTs\|dGs\|dAs\|dTs\|dGs\|5mCs\|dAs\|5mCs\|dTs\|dGs\|5mCs\|oTs\|oT] |
| 1880 | [oGs\|o5mCs\|oTs\|oAs\|LGs\|oGs\|oTs\|dGs\|dAs\|dTs\|dGs\|5mCs\|dAs\|5mCs\|dTs\|dGs\|5mCs\|oTs\|oT] |
| 1881 | [oGs\|o5mCs\|oTs\|oAs\|oGs\|LGs\|oTs\|dGs\|dAs\|dTs\|dGs\|5mCs\|dAs\|5mCs\|dTs\|dGs\|5mCs\|oTs\|oT] |
| 1882 | [o5mCs\|oTs\|dAs\|dGs\|dGs\|dTs\|dGs\|dAs\|dTs\|dGs\|5mCs\|dAs\|o5mCs\|oTs\|oGs\|o5mCs\|oTs\|LTs\|oT] |
| 1883 | [o5mCs\|oTs\|dAs\|dGs\|dGs\|dTs\|dGs\|dAs\|dTs\|dGs\|5mCs\|dAs\|o5mCs\|oTs\|oGs\|o5mCs\|LTs\|oTs\|oT] |
| 1884 | [o5mCs\|oTs\|dAs\|dGs\|dGs\|dTs\|dGs\|dAs\|dTs\|dGs\|5mCs\|dAs\|o5mCs\|oTs\|oGs\|L5mCs\|oTs\|oTs\|oT] |
| 1885 | [o5mCs\|oTs\|dAs\|dGs\|dGs\|dTs\|dGs\|dAs\|dTs\|dGs\|5mCs\|dAs\|o5mCs\|oTs\|LGs\|o5mCs\|oTs\|oTs\|oT] |
| 1886 | [o5mCs\|oTs\|dAs\|dGs\|dGs\|dTs\|dGs\|dAs\|dTs\|dGs\|5mCs\|dAs\|o5mCs\|LTs\|oGs\|o5mCs\|oTs\|oTs\|oT] |
| 1887 | [oGs\|L5mCs\|oTs\|oAs\|oGs\|oGs\|dTs\|dGs\|dAs\|dTs\|dGs\|5mCs\|dAs\|5mCs\|dTs\|dGs\|o5mCs\|oTs\|oTs\|oT] |
| 1888 | [oGs\|o5mCs\|LTs\|oAs\|oGs\|oGs\|dTs\|dGs\|dAs\|dTs\|dGs\|5mCs\|dAs\|5mCs\|dTs\|dGs\|o5mCs\|oTs\|oTs\|oT] |
| 1889 | [oGs\|o5mCs\|oTs\|LAs\|oGs\|oGs\|dTs\|dGs\|dAs\|dTs\|dGs\|5mCs\|dAs\|5mCs\|dTs\|dGs\|o5mCs\|oTs\|oTs\|oT] |
| 1890 | [oGs\|o5mCs\|oTs\|oAs\|LGs\|oGs\|dTs\|dGs\|dAs\|dTs\|dGs\|5mCs\|dAs\|5mCs\|dTs\|dGs\|o5mCs\|oTs\|oTs\|oT] |
| 1891 | [oGs\|o5mCs\|oTs\|oAs\|dGs\|dGs\|dTs\|dGs\|dAs\|dTs\|dGs\|5mCs\|dAs\|5mCs\|oTs\|oGs\|o5mCs\|oTs\|LTs\|oT] |
| 1892 | [oGs\|o5mCs\|oTs\|oAs\|dGs\|dGs\|dTs\|dGs\|dAs\|dTs\|dGs\|5mCs\|dAs\|5mCs\|oTs\|oGs\|o5mCs\|LTs\|oTs\|oT] |
| 1893 | [oGs\|o5mCs\|oTs\|oAs\|dGs\|dGs\|dTs\|dGs\|dAs\|dTs\|dGs\|5mCs\|dAs\|5mCs\|oTs\|oGs\|L5mCs\|oTs\|oTs\|oT] |
| 1894 | [oGs\|o5mCs\|oTs\|oAs\|dGs\|dGs\|dTs\|dGs\|dAs\|dTs\|dGs\|5mCs\|dAs\|5mCs\|oTs\|LGs\|o5mCs\|oTs\|oTs\|oT] |
| 1895 | [oGs\|L5mCs\|oTs\|oAs\|oGs\|oGs\|dTs\|dGs\|dAs\|dTs\|dGs\|5mCs\|dAs\|5mCs\|dTs\|dGs\|o5mCs\|oTs\|oT] |
| 1896 | [oGs\|o5mCs\|LTs\|oAs\|oGs\|oGs\|dTs\|dGs\|dAs\|dTs\|dGs\|5mCs\|dAs\|5mCs\|dTs\|dGs\|o5mCs\|oTs\|oT] |
| 1897 | [oGs\|o5mCs\|oTs\|LAs\|oGs\|oGs\|dTs\|dGs\|dAs\|dTs\|dGs\|5mCs\|dAs\|5mCs\|dTs\|dGs\|o5mCs\|oTs\|oT] |
| 1898 | [oGs\|o5mCs\|oTs\|oAs\|LGs\|oGs\|dTs\|dGs\|dAs\|dTs\|dGs\|5mCs\|dAs\|5mCs\|dTs\|dGs\|o5mCs\|oTs\|oT] |
| 1899 | [oGs\|o5mCs\|oTs\|dAs\|dGs\|dGs\|dTs\|dGs\|dAs\|dTs\|dGs\|5mCs\|dAs\|5mCs\|oTs\|oGs\|o5mCs\|oTs\|LTs\|oT] |
| 1900 | [oGs\|o5mCs\|oTs\|dAs\|dGs\|dGs\|dTs\|dGs\|dAs\|dTs\|dGs\|5mCs\|dAs\|5mCs\|oTs\|oGs\|o5mCs\|LTs\|oTs\|oT] |
| 1901 | [oGs\|o5mCs\|oTs\|dAs\|dGs\|dGs\|dTs\|dGs\|dAs\|dTs\|dGs\|5mCs\|dAs\|5mCs\|oTs\|oGs\|L5mCs\|oTs\|oTs\|oT] |
| 1902 | [oGs\|L5mCs\|oTs\|oAs\|oGs\|oGs\|dTs\|dGs\|dAs\|dTs\|dGs\|5mCs\|dAs\|5mCs\|dTs\|dGs\|o5mCs\|oT] |
| 1903 | [oGs\|o5mCs\|LTs\|oAs\|oGs\|oGs\|dTs\|dGs\|dAs\|dTs\|dGs\|5mCs\|dAs\|5mCs\|dTs\|dGs\|o5mCs\|oT] |
| 1904 | [oGs\|o5mCs\|oTs\|LAs\|oGs\|oGs\|dTs\|dGs\|dAs\|dTs\|dGs\|5mCs\|dAs\|5mCs\|dTs\|dGs\|o5mCs\|oT] |
| 1905 | [oGs\|o5mCs\|oTs\|oAs\|LGs\|oGs\|dTs\|dGs\|dAs\|dTs\|dGs\|5mCs\|dAs\|5mCs\|dTs\|dGs\|o5mCs\|oT] |
| 1906 | [oTs\|oAs\|dGs\|dGs\|dTs\|dGs\|dAs\|dTs\|dGs\|5mCs\|dAs\|5mCs\|oTs\|oGs\|o5mCs\|oTs\|LTs\|oT] |
| 1907 | [oTs\|oAs\|dGs\|dGs\|dTs\|dGs\|dAs\|dTs\|dGs\|5mCs\|dAs\|5mCs\|oTs\|oGs\|o5mCs\|LTs\|oTs\|oT] |
| 1908 | [oTs\|oAs\|dGs\|dGs\|dTs\|dGs\|dAs\|dTs\|dGs\|5mCs\|dAs\|5mCs\|oTs\|oGs\|L5mCs\|oTs\|oTs\|oT] |
| 1909 | [oTs\|oAs\|dGs\|dGs\|dTs\|dGs\|dAs\|dTs\|dGs\|5mCs\|dAs\|5mCs\|oTs\|LGs\|o5mCs\|oTs\|oTs\|oT] |
| 1910 | [oGs\|L5mCs\|oTs\|oAs\|oGs\|dGs\|dTs\|dGs\|dAs\|dTs\|dGs\|5mCs\|dAs\|5mCs\|dTs\|oGs\|o5mCs\|oTs\|oTs\|oT] |
| 1911 | [oGs\|o5mCs\|LTs\|oAs\|oGs\|dGs\|dTs\|dGs\|dAs\|dTs\|dGs\|5mCs\|dAs\|5mCs\|dTs\|oGs\|o5mCs\|oTs\|oTs\|oT] |
| 1912 | [oGs\|o5mCs\|oTs\|LAs\|oGs\|dGs\|dTs\|dGs\|dAs\|dTs\|dGs\|5mCs\|dAs\|5mCs\|dTs\|oGs\|o5mCs\|oTs\|oTs\|oT] |
| 1913 | [oGs\|o5mCs\|oTs\|oAs\|oGs\|dGs\|dTs\|dGs\|dAs\|dTs\|dGs\|5mCs\|dAs\|5mCs\|dTs\|oGs\|o5mCs\|oTs\|LTs\|oT] |
| 1914 | [oGs\|o5mCs\|oTs\|oAs\|oGs\|dGs\|dTs\|dGs\|dAs\|dTs\|dGs\|5mCs\|dAs\|5mCs\|dTs\|oGs\|o5mCs\|LTs\|oTs\|oT] |
| 1915 | [oGs\|o5mCs\|oTs\|oAs\|oGs\|dGs\|dTs\|dGs\|dAs\|dTs\|dGs\|5mCs\|dAs\|5mCs\|dTs\|oGs\|L5mCs\|oTs\|oTs\|oT] |
| 1916 | [oGs\|L5mCs\|oTs\|oAs\|oGs\|dGs\|dTs\|dGs\|dAs\|dTs\|dGs\|5mCs\|dAs\|5mCs\|dTs\|oGs\|o5mCs\|oTs\|oT] |
| 1917 | [oGs\|o5mCs\|LTs\|oAs\|oGs\|dGs\|dTs\|dGs\|dAs\|dTs\|dGs\|5mCs\|dAs\|5mCs\|dTs\|oGs\|o5mCs\|oTs\|oT] |
| 1918 | [oGs\|o5mCs\|oTs\|LAs\|oGs\|dGs\|dTs\|dGs\|dAs\|dTs\|dGs\|5mCs\|dAs\|5mCs\|dTs\|oGs\|o5mCs\|oTs\|oT] |
| 1919 | [o5mCs\|oTs\|oAs\|oGs\|dGs\|dTs\|dGs\|dAs\|dTs\|dGs\|5mCs\|dAs\|5mCs\|dTs\|oGs\|o5mCs\|oTs\|LTs\|oT] |
| 1920 | [o5mCs\|oTs\|oAs\|oGs\|dGs\|dTs\|dGs\|dAs\|dTs\|dGs\|5mCs\|dAs\|5mCs\|dTs\|oGs\|o5mCs\|LTs\|oTs\|oT] |
| 1921 | [o5mCs\|oTs\|oAs\|oGs\|dGs\|dTs\|dGs\|dAs\|dTs\|dGs\|5mCs\|dAs\|5mCs\|dTs\|oGs\|L5mCs\|oTs\|oTs\|oT] |
| 1922 | [oGs\|L5mCs\|oTs\|oAs\|oGs\|dGs\|dTs\|dGs\|dAs\|dTs\|dGs\|5mCs\|dAs\|5mCs\|dTs\|oGs\|o5mCs\|oT] |
| 1923 | [oGs\|o5mCs\|LTs\|oAs\|oGs\|dGs\|dTs\|dGs\|dAs\|dTs\|dGs\|5mCs\|dAs\|5mCs\|dTs\|oGs\|o5mCs\|oT] |
| 1924 | [oGs\|o5mCs\|oTs\|LAs\|oGs\|dGs\|dTs\|dGs\|dAs\|dTs\|dGs\|5mCs\|dAs\|5mCs\|dTs\|oGs\|o5mCs\|oT] |
| 1925 | [oTs\|oAs\|oGs\|dGs\|dTs\|dGs\|dAs\|dTs\|dGs\|5mCs\|dAs\|5mCs\|dTs\|oGs\|o5mCs\|oTs\|LTs\|oT] |
| 1926 | [oTs\|oAs\|oGs\|dGs\|dTs\|dGs\|dAs\|dTs\|dGs\|5mCs\|dAs\|5mCs\|dTs\|oGs\|o5mCs\|LTs\|oTs\|oT] |
| 1927 | [oTs\|oAs\|oGs\|dGs\|dTs\|dGs\|dAs\|dTs\|dGs\|5mCs\|dAs\|5mCs\|dTs\|oGs\|L5mCs\|oTs\|oTs\|oT] |
| 1928 | [oGs\|L5mCs\|oTs\|oAs\|oGs\|dGs\|dTs\|dGs\|dAs\|dTs\|dGs\|5mCs\|dAs\|5mCs\|dTs\|oGs\|o5mC] |
| 1929 | [oGs\|o5mCs\|LTs\|oAs\|oGs\|dGs\|dTs\|dGs\|dAs\|dTs\|dGs\|5mCs\|dAs\|5mCs\|dTs\|oGs\|o5mC] |
| 1930 | [oGs\|o5mCs\|oTs\|LAs\|oGs\|dGs\|dTs\|dGs\|dAs\|dTs\|dGs\|5mCs\|dAs\|5mCs\|dTs\|oGs\|o5mC] |
| 1931 | [oAs\|oGs\|dGs\|dTs\|dGs\|dAs\|dTs\|dGs\|5mCs\|dAs\|5mCs\|dTs\|oGs\|o5mCs\|oTs\|LTs\|oT] |
| 1932 | [oAs\|oGs\|dGs\|dTs\|dGs\|dAs\|dTs\|dGs\|5mCs\|dAs\|5mCs\|dTs\|oGs\|o5mCs\|LTs\|oTs\|oT] |
| 1933 | [oAs\|oGs\|dGs\|dTs\|dGs\|dAs\|dTs\|dGs\|5mCs\|dAs\|5mCs\|dTs\|oGs\|L5mCs\|oTs\|oTs\|oT] |
| 1934 | [o5mCs\|LTs\|oAs\|oGs\|dGs\|dTs\|dGs\|dAs\|dTs\|dGs\|5mCs\|dAs\|5mCs\|dTs\|oGs\|o5mCs\|oTs\|oTs\|oT] |
| 1935 | [o5mCs\|oTs\|LAs\|oGs\|dGs\|dTs\|dGs\|dAs\|dTs\|dGs\|5mCs\|dAs\|5mCs\|dTs\|oGs\|o5mCs\|oTs\|oTs\|oT] |
| 1936 | [oGs\|o5mCs\|oTs\|oAs\|oGs\|dGs\|dTs\|dGs\|dAs\|dTs\|dGs\|5mCs\|dAs\|5mCs\|dTs\|oGs\|o5mCs\|LTs\|oT] |
| 1937 | [oGs\|o5mCs\|oTs\|oAs\|oGs\|dGs\|dTs\|dGs\|dAs\|dTs\|dGs\|5mCs\|dAs\|5mCs\|dTs\|oGs\|L5mCs\|oTs\|oT] |
| 1938 | [o5mCs\|LTs\|oAs\|oGs\|dGs\|dTs\|dGs\|dAs\|dTs\|dGs\|5mCs\|dAs\|5mCs\|dTs\|oGs\|o5mCs\|oTs\|oT] |
| 1939 | [o5mCs\|oTs\|LAs\|oGs\|dGs\|dTs\|dGs\|dAs\|dTs\|dGs\|5mCs\|dAs\|5mCs\|dTs\|oGs\|o5mCs\|oTs\|oT] |
| 1940 | [o5mCs\|oTs\|oAs\|oGs\|dGs\|dTs\|dGs\|dAs\|dTs\|dGs\|5mCs\|dAs\|5mCs\|dTs\|oGs\|o5mCs\|LTs\|oT] |
| 1941 | [o5mCs\|oTs\|oAs\|oGs\|dGs\|dTs\|dGs\|dAs\|dTs\|dGs\|5mCs\|dAs\|5mCs\|dTs\|oGs\|L5mCs\|oTs\|oT] |
| 1942 | [o5mCs\|LTs\|oAs\|oGs\|dGs\|dTs\|dGs\|dAs\|dTs\|dGs\|5mCs\|dAs\|5mCs\|dTs\|oGs\|o5mCs\|oT] |
| 1943 | [o5mCs\|oTs\|LAs\|oGs\|dGs\|dTs\|dGs\|dAs\|dTs\|dGs\|5mCs\|dAs\|5mCs\|dTs\|oGs\|o5mCs\|oT] |
| 1944 | [o5mCs\|oTs\|oAs\|oGs\|dGs\|dTs\|dGs\|dAs\|dTs\|dGs\|5mCs\|dAs\|5mCs\|dTs\|oGs\|L5mCs\|oT] |
| 1945 | [oGs\|o5mCs\|oTs\|oAs\|oGs\|oGs\|oTs\|oGs\|dAs\|dTs\|dGs\|5mCs\|dAs\|5mCs\|dTs\|dGs\|5mCs\|dTs\|oTs\|oT] |
| 1946 | [oGs\|o5mCs\|dTs\|dAs\|dGs\|dGs\|dTs\|dGs\|dAs\|dTs\|dGs\|5mCs\|oAs\|o5mCs\|oTs\|oGs\|o5mCs\|oTs\|oTs\|oT] |
| 1947 | [oGs\|o5mCs\|oTs\|oAs\|oGs\|oGs\|oTs\|dGs\|dAs\|dTs\|dGs\|5mCs\|dAs\|5mCs\|dTs\|dGs\|5mCs\|oTs\|oTs\|oT] |
| 1948 | [oGs\|o5mCs\|oTs\|dAs\|dGs\|dGs\|dTs\|dGs\|dAs\|dTs\|dGs\|5mCs\|dAs\|o5mCs\|oTs\|oGs\|o5mCs\|oTs\|oTs\|oT] |
| 1949 | [oGs\|o5mCs\|oTs\|oAs\|oGs\|oGs\|oTs\|dGs\|dAs\|dTs\|dGs\|5mCs\|dAs\|5mCs\|dTs\|dGs\|5mCs\|oTs\|oT] |
| 1950 | [o5mCs\|oTs\|dAs\|dGs\|dGs\|dTs\|dGs\|dAs\|dTs\|dGs\|5mCs\|dAs\|o5mCs\|oTs\|oGs\|o5mCs\|oTs\|oTs\|oT] |
| 1951 | [oGs\|o5mCs\|oTs\|oAs\|oGs\|oGs\|dTs\|dGs\|dAs\|dTs\|dGs\|5mCs\|dAs\|5mCs\|dTs\|dGs\|o5mCs\|oTs\|oTs\|oT] |
| 1952 | [oGs\|o5mCs\|oTs\|oAs\|dGs\|dGs\|dTs\|dGs\|dAs\|dTs\|dGs\|5mCs\|dAs\|5mCs\|oTs\|oGs\|o5mCs\|oTs\|oTs\|oT] |
| 1953 | [oGs\|o5mCs\|oTs\|oAs\|oGs\|oGs\|dTs\|dGs\|dAs\|dTs\|dGs\|5mCs\|dAs\|5mCs\|dTs\|dGs\|o5mCs\|oTs\|oT] |
| 1954 | [oGs\|o5mCs\|oTs\|dAs\|dGs\|dGs\|dTs\|dGs\|dAs\|dTs\|dGs\|5mCs\|dAs\|5mCs\|oTs\|oGs\|o5mCs\|oTs\|oTs\|oT] |
| 1955 | [oGs\|o5mCs\|oTs\|oAs\|oGs\|oGs\|dTs\|dGs\|dAs\|dTs\|dGs\|5mCs\|dAs\|5mCs\|dTs\|dGs\|o5mCs\|oT] |
| 1956 | [oTs\|oAs\|dGs\|dGs\|dTs\|dGs\|dAs\|dTs\|dGs\|5mCs\|dAs\|5mCs\|oTs\|oGs\|o5mCs\|oTs\|oTs\|oT] |
| 1957 | [oGs\|o5mCs\|oTs\|oAs\|oGs\|dGs\|dTs\|dGs\|dAs\|dTs\|dGs\|5mCs\|dAs\|5mCs\|dTs\|oGs\|o5mCs\|oTs\|oTs\|oT] |
| 1958 | [oGs\|o5mCs\|oTs\|oAs\|oGs\|dGs\|dTs\|dGs\|dAs\|dTs\|dGs\|5mCs\|dAs\|5mCs\|dTs\|oGs\|o5mCs\|oTs\|oT] |
| 1959 | [oGs\|o5mCs\|oTs\|oAs\|oGs\|dGs\|dTs\|dGs\|dAs\|dTs\|dGs\|5mCs\|dAs\|5mCs\|dTs\|oGs\|o5mCs\|oT] |
| 1960 | [oTs\|oAs\|oGs\|dGs\|dTs\|dGs\|dAs\|dTs\|dGs\|5mCs\|dAs\|5mCs\|dTs\|oGs\|o5mCs\|oTs\|oTs\|oT] |
| 1961 | [oGs\|o5mCs\|oTs\|oAs\|oGs\|dGs\|dTs\|dGs\|dAs\|dTs\|dGs\|5mCs\|dAs\|5mCs\|dTs\|oGs\|o5mC] |
| 1962 | [oAs\|oGs\|dGs\|dTs\|dGs\|dAs\|dTs\|dGs\|5mCs\|dAs\|5mCs\|dTs\|oGs\|o5mCs\|oTs\|oTs\|oT] |
| 1963 | [o5mCs\|oTs\|oAs\|oGs\|dGs\|dTs\|dGs\|dAs\|dTs\|dGs\|5mCs\|dAs\|5mCs\|dTs\|oGs\|o5mCs\|oTs\|oTs\|oT] |
| 1964 | [o5mCs\|oTs\|oAs\|oGs\|dGs\|dTs\|dGs\|dAs\|dTs\|dGs\|5mCs\|dAs\|5mCs\|dTs\|oGs\|o5mCs\|oTs\|oT] |
| 1965 | [o5mCs\|oTs\|oAs\|oGs\|dGs\|dTs\|dGs\|dAs\|dTs\|dGs\|5mCs\|dAs\|5mCs\|dTs\|oGs\|o5mCs\|oT] |
| 1966 | [oGs\|o5mCs\|oTp\|oAs\|oGs\|dGs\|dTs\|dGs\|dAs\|dTs\|dGs\|5mCs\|dAs\|5mCs\|dTs\|oGs\|o5mCs\|oTs\|oTs\|oT] |
| 1967 | [oGs\|o5mCs\|oTs\|oAp\|oGs\|dGs\|dTs\|dGs\|dAs\|dTs\|dGs\|5mCs\|dAs\|5mCs\|dTs\|oGs\|o5mCs\|oTs\|oTs\|oT] |
| 1968 | [oGs\|o5mCs\|oTp\|oAp\|oGs\|dGs\|dTs\|dGs\|dAs\|dTs\|dGs\|5mCs\|dAs\|5mCs\|dTs\|oGs\|o5mCs\|oTs\|oTs\|oT] |
| 1969 | [oGs\|o5mCs\|oTs\|oAs\|oGs\|dGs\|dTs\|dGs\|dAs\|dTs\|dGs\|5mCs\|dAs\|5mCs\|dTs\|oGs\|o5mCp\|oTs\|oTs\|oT] |
| 1970 | [oGs\|o5mCs\|oTs\|oAs\|oGs\|dGs\|dTs\|dGs\|dAs\|dTs\|dGs\|5mCs\|dAs\|5mCs\|dTs\|oGp\|o5mCs\|oTs\|oTs\|oT] |
| 1971 | [oGs\|o5mCs\|oTs\|oAs\|oGs\|dGs\|dTs\|dGs\|dAs\|dTs\|dGs\|5mCs\|dAs\|5mCs\|dTs\|oGp\|o5mCp\|oTs\|oTs\|oT] |
| 1972 | [oGs\|o5mCs\|oTp\|oAs\|oGs\|dGs\|dTs\|dGs\|dAs\|dTs\|dGs\|5mCs\|dAs\|5mCs\|dTs\|oGs\|o5mCp\|oTs\|oTs\|oT] |
| 1973 | [oGs\|o5mCs\|oTp\|oAs\|oGs\|dGs\|dTs\|dGs\|dAs\|dTs\|dGs\|5mCs\|dAs\|5mCs\|dTs\|oGp\|o5mCs\|oTs\|oTs\|oT] |
| 1974 | [oGs\|o5mCs\|oTs\|oAp\|oGs\|dGs\|dTs\|dGs\|dAs\|dTs\|dGs\|5mCs\|dAs\|5mCs\|dTs\|oGs\|o5mCp\|oTs\|oTs\|oT] |
| 1975 | [oGs\|o5mCs\|oTs\|oAp\|oGs\|dGs\|dTs\|dGs\|dAs\|dTs\|dGs\|5mCs\|dAs\|5mCs\|dTs\|oGp\|o5mCs\|oTs\|oTs\|oT] |
| 1976 | [oGs\|o5mCs\|oTp\|oAs\|oGs\|dGs\|dTs\|dGs\|dAs\|dTs\|dGs\|5mCs\|dAs\|5mCs\|dTs\|oGp\|o5mCp\|oTs\|oTs\|oT] |
| 1977 | [oGs\|o5mCs\|oTs\|oAp\|oGs\|dGs\|dTs\|dGs\|dAs\|dTs\|dGs\|5mCs\|dAs\|5mCs\|dTs\|oGp\|o5mCp\|oTs\|oTs\|oT] |
| 1978 | [oGs\|o5mCs\|oTp\|oAp\|oGs\|dGs\|dTs\|dGs\|dAs\|dTs\|dGs\|5mCs\|dAs\|5mCs\|dTs\|oGs\|o5mCp\|oTs\|oTs\|oT] |
| 1979 | [oGs\|o5mCs\|oTp\|oAp\|oGs\|dGs\|dTs\|dGs\|dAs\|dTs\|dGs\|5mCs\|dAs\|5mCs\|dTs\|oGp\|o5mCs\|oTs\|oTs\|oT] |
| 1980 | [oGs\|o5mCs\|oTp\|oAp\|oGs\|dGs\|dTs\|dGs\|dAs\|dTs\|dGs\|5mCs\|dAs\|5mCs\|dTs\|oGp\|o5mCp\|oTs\|oTs\|oT] |
| 1981 | [oGs\|o5mCs\|oTs\|oAs\|oGs\|dGs\|dTs\|dGs\|dAs\|dTs\|dGs\|5mCs\|dAs\|5mCs\|dTs\|oGs\|o5mCs\|oTs\|oTs\|oTs\|oA] |
| 1982 | [oGs\|o5mCs\|oTp\|oAs\|oGs\|dGs\|dTs\|dGs\|dAs\|dTs\|dGs\|5mCs\|dAs\|5mCs\|dTs\|oGs\|o5mCs\|oTs\|oTs\|oTs\|oA] |
| 1983 | [oGs\|o5mCs\|oTs\|oAp\|oGs\|dGs\|dTs\|dGs\|dAs\|dTs\|dGs\|5mCs\|dAs\|5mCs\|dTs\|oGs\|o5mCs\|oTs\|oTs\|oTs\|oA] |
| 1984 | [oGs\|o5mCs\|oTp\|oAp\|oGs\|dGs\|dTs\|dGs\|dAs\|dTs\|dGs\|5mCs\|dAs\|5mCs\|dTs\|oGs\|o5mCs\|oTs\|oTs\|oTs\|oA] |
| 1985 | [oGs\|o5mCs\|oTs\|oAs\|oGs\|dGs\|dTs\|dGs\|dAs\|dTs\|dGs\|5mCs\|dAs\|5mCs\|dTs\|oGs\|o5mCp\|oTs\|oTs\|oTs\|oA] |
| 1986 | [oGs\|o5mCs\|oTs\|oAs\|oGs\|dGs\|dTs\|dGs\|dAs\|dTs\|dGs\|5mCs\|dAs\|5mCs\|dTs\|oGp\|o5mCs\|oTs\|oTs\|oTs\|oA] |
| 1987 | [oGs\|o5mCs\|oTs\|oAs\|oGs\|dGs\|dTs\|dGs\|dAs\|dTs\|dGs\|5mCs\|dAs\|5mCs\|dTs\|oGp\|o5mCp\|oTs\|oTs\|oTs\|oA] |
| 1988 | [oGs\|o5mCs\|oTp\|oAs\|oGs\|dGs\|dTs\|dGs\|dAs\|dTs\|dGs\|5mCs\|dAs\|5mCs\|dTs\|oGs\|o5mCp\|oTs\|oTs\|oTs\|oA] |
| 1989 | [oGs\|o5mCs\|oTp\|oAs\|oGs\|dGs\|dTs\|dGs\|dAs\|dTs\|dGs\|5mCs\|dAs\|5mCs\|dTs\|oGp\|o5mCs\|oTs\|oTs\|oTs\|oA] |
| 1990 | [oGs\|o5mCs\|oTs\|oAp\|oGs\|dGs\|dTs\|dGs\|dAs\|dTs\|dGs\|5mCs\|dAs\|5mCs\|dTs\|oGs\|o5mCp\|oTs\|oTs\|oTs\|oA] |
| 1991 | [oGs\|o5mCs\|oTs\|oAp\|oGs\|dGs\|dTs\|dGs\|dAs\|dTs\|dGs\|5mCs\|dAs\|5mCs\|dTs\|oGp\|o5mCs\|oTs\|oTs\|oTs\|oA] |
| 1992 | [oGs\|o5mCs\|oTp\|oAs\|oGs\|dGs\|dTs\|dGs\|dAs\|dTs\|dGs\|5mCs\|dAs\|5mCs\|dTs\|oGp\|o5mCp\|oTs\|oTs\|oTs\|oA] |
| 1993 | [oGs\|o5mCs\|oTs\|oAp\|oGs\|dGs\|dTs\|dGs\|dAs\|dTs\|dGs\|5mCs\|dAs\|5mCs\|dTs\|oGp\|o5mCp\|oTs\|oTs\|oTs\|oA] |
| 1994 | [oGs\|o5mCs\|oTp\|oAp\|oGs\|dGs\|dTs\|dGs\|dAs\|dTs\|dGs\|5mCs\|dAs\|5mCs\|dTs\|oGs\|o5mCp\|oTs\|oTs\|oTs\|oA] |
| 1995 | [oGs\|o5mCs\|oTp\|oAp\|oGs\|dGs\|dTs\|dGs\|dAs\|dTs\|dGs\|5mCs\|dAs\|5mCs\|dTs\|oGp\|o5mCs\|oTs\|oTs\|oTs\|oA] |
| 1996 | [oGs\|o5mCs\|oTp\|oAp\|oGs\|dGs\|dTs\|dGs\|dAs\|dTs\|dGs\|5mCs\|dAs\|5mCs\|dTs\|oGp\|o5mCp\|oTs\|oTs\|oTs\|oA] |
| 1997 | [oGs\|o5mCs\|oTs\|oAs\|oGs\|dGs\|dTs\|dGs\|dAs\|dTs\|dGs\|5mCs\|dAs\|5mCs\|dTs\|oGs\|o5mCs\|oTs\|oTs\|oTs\|oAs\|o5mC] |
| 1998 | [oGs\|o5mCs\|oTp\|oAs\|oGs\|dGs\|dTs\|dGs\|dAs\|dTs\|dGs\|5mCs\|dAs\|5mCs\|dTs\|oGs\|o5mCs\|oTs\|oTs\|oTs\|oAs\|o5mC] |
| 1999 | [oGs\|o5mCs\|oTs\|oAp\|oGs\|dGs\|dTs\|dGs\|dAs\|dTs\|dGs\|5mCs\|dAs\|5mCs\|dTs\|oGs\|o5mCs\|oTs\|oTs\|oTs\|oAs\|o5mC] |
| 2000 | [oGs\|o5mCs\|oTp\|oAp\|oGs\|dGs\|dTs\|dGs\|dAs\|dTs\|dGs\|5mCs\|dAs\|5mCs\|dTs\|oGs\|o5mCs\|oTs\|oTs\|oTs\|oAs\|o5mC] |
| 2001 | [oGs\|o5mCs\|oTs\|oAs\|oGs\|dGs\|dTs\|dGs\|dAs\|dTs\|dGs\|5mCs\|dAs\|5mCs\|dTs\|oGs\|o5mCp\|oTs\|oTs\|oTs\|oAs\|o5mC] |
| 2002 | [oGs\|o5mCs\|oTs\|oAs\|oGs\|dGs\|dTs\|dGs\|dAs\|dTs\|dGs\|5mCs\|dAs\|5mCs\|dTs\|oGp\|o5mCs\|oTs\|oTs\|oTs\|oAs\|o5mC] |
| 2003 | [oGs\|o5mCs\|oTs\|oAs\|oGs\|dGs\|dTs\|dGs\|dAs\|dTs\|dGs\|5mCs\|dAs\|5mCs\|dTs\|oGp\|o5mCp\|oTs\|oTs\|oTs\|oAs\|o5mC] |
| 2004 | [oGs\|o5mCs\|oTp\|oAs\|oGs\|dGs\|dTs\|dGs\|dAs\|dTs\|dGs\|5mCs\|dAs\|5mCs\|dTs\|oGs\|o5mCp\|oTs\|oTs\|oTs\|oAs\|o5mC] |
| 2005 | [oGs\|o5mCs\|oTp\|oAs\|oGs\|dGs\|dTs\|dGs\|dAs\|dTs\|dGs\|5mCs\|dAs\|5mCs\|dTs\|oGp\|o5mCs\|oTs\|oTs\|oTs\|oAs\|o5mC] |
| 2006 | [oGs\|o5mCs\|oTs\|oAp\|oGs\|dGs\|dTs\|dGs\|dAs\|dTs\|dGs\|5mCs\|dAs\|5mCs\|dTs\|oGs\|o5mCp\|oTs\|oTs\|oTs\|oAs\|o5mC] |
| 2007 | [oGs\|o5mCs\|oTs\|oAp\|oGs\|dGs\|dTs\|dGs\|dAs\|dTs\|dGs\|5mCs\|dAs\|5mCs\|dTs\|oGp\|o5mCs\|oTs\|oTs\|oTs\|oAs\|o5mC] |
| 2008 | [oGs\|o5mCs\|oTp\|oAs\|oGs\|dGs\|dTs\|dGs\|dAs\|dTs\|dGs\|5mCs\|dAs\|5mCs\|dTs\|oGp\|o5mCp\|oTs\|oTs\|oTs\|oAs\|o5mC] |
| 2009 | [oGs\|o5mCs\|oTs\|oAp\|oGs\|dGs\|dTs\|dGs\|dAs\|dTs\|dGs\|5mCs\|dAs\|5mCs\|dTs\|oGp\|o5mCp\|oTs\|oTs\|oTs\|oAs\|o5mC] |
| 2010 | [oGs\|o5mCs\|oTp\|oAp\|oGs\|dGs\|dTs\|dGs\|dAs\|dTs\|dGs\|5mCs\|dAs\|5mCs\|dTs\|oGs\|o5mCp\|oTs\|oTs\|oTs\|oAs\|o5mC] |
| 2011 | [oGs\|o5mCs\|oTp\|oAp\|oGs\|dGs\|dTs\|dGs\|dAs\|dTs\|dGs\|5mCs\|dAs\|5mCs\|dTs\|oGp\|o5mCs\|oTs\|oTs\|oTs\|oAs\|o5mC] |
| 2012 | [oGs\|o5mCs\|oTp\|oAp\|oGs\|dGs\|dTs\|dGs\|dAs\|dTs\|dGs\|5mCs\|dAs\|5mCs\|dTs\|oGp\|o5mCp\|oTs\|oTs\|oTs\|oAs\|o5mC] |
| 2013 | [oGs\|o5mCs\|oTs\|oAs\|oGs\|dGs\|dTs\|dGs\|dAs\|dTs\|dGs\|5mCs\|dAs\|5mCs\|dTs\|oGs\|o5mCs\|oTs\|oTs\|oTs\|oAs\|o5mCs\|oA] |
| 2014 | [oGs\|o5mCs\|oTp\|oAs\|oGs\|dGs\|dTs\|dGs\|dAs\|dTs\|dGs\|5mCs\|dAs\|5mCs\|dTs\|oGs\|o5mCs\|oTs\|oTs\|oTs\|oAs\|o5mCs\|oA] |
| 2015 | [oGs\|o5mCs\|oTs\|oAp\|oGs\|dGs\|dTs\|dGs\|dAs\|dTs\|dGs\|5mCs\|dAs\|5mCs\|dTs\|oGs\|o5mCs\|oTs\|oTs\|oTs\|oAs\|o5mCs\|oA] |
| 2016 | [oGs\|o5mCs\|oTp\|oAp\|oGs\|dGs\|dTs\|dGs\|dAs\|dTs\|dGs\|5mCs\|dAs\|5mCs\|dTs\|oGs\|o5mCs\|oTs\|oTs\|oTs\|oAs\|o5mCs\|oA] |
| 2017 | [oGs\|o5mCs\|oTs\|oAs\|oGs\|dGs\|dTs\|dGs\|dAs\|dTs\|dGs\|5mCs\|dAs\|5mCs\|dTs\|oGs\|o5mCp\|oTs\|oTs\|oTs\|oAs\|o5mCs\|oA] |
| 2018 | [oGs\|o5mCs\|oTs\|oAs\|oGs\|dGs\|dTs\|dGs\|dAs\|dTs\|dGs\|5mCs\|dAs\|5mCs\|dTs\|oGp\|o5mCs\|oTs\|oTs\|oTs\|oAs\|o5mCs\|oA] |
| 2019 | [oGs\|o5mCs\|oTs\|oAs\|oGs\|dGs\|dTs\|dGs\|dAs\|dTs\|dGs\|5mCs\|dAs\|5mCs\|dTs\|oGp\|o5mCp\|oTs\|oTs\|oTs\|oAs\|o5mCs\|oA] |
| 2020 | [oGs\|o5mCs\|oTp\|oAs\|oGs\|dGs\|dTs\|dGs\|dAs\|dTs\|dGs\|5mCs\|dAs\|5mCs\|dTs\|oGs\|o5mCp\|oTs\|oTs\|oTs\|oAs\|o5mCs\|oA] |
| 2021 | [oGs\|o5mCs\|oTp\|oAs\|oGs\|dGs\|dTs\|dGs\|dAs\|dTs\|dGs\|5mCs\|dAs\|5mCs\|dTs\|oGp\|o5mCs\|oTs\|oTs\|oTs\|oAs\|o5mCs\|oA] |
| 2022 | [oGs\|o5mCs\|oTs\|oAp\|oGs\|dGs\|dTs\|dGs\|dAs\|dTs\|dGs\|5mCs\|dAs\|5mCs\|dTs\|oGs\|o5mCp\|oTs\|oTs\|oTs\|oAs\|o5mCs\|oA] |
| 2023 | [oGs\|o5mCs\|oTs\|oAp\|oGs\|dGs\|dTs\|dGs\|dAs\|dTs\|dGs\|5mCs\|dAs\|5mCs\|dTs\|oGp\|o5mCs\|oTs\|oTs\|oTs\|oAs\|o5mCs\|oA] |
| 2024 | [oGs\|o5mCs\|oTp\|oAs\|oGs\|dGs\|dTs\|dGs\|dAs\|dTs\|dGs\|5mCs\|dAs\|5mCs\|dTs\|oGp\|o5mCp\|oTs\|oTs\|oTs\|oAs\|o5mCs\|oA] |
| 2025 | [oGs\|o5mCs\|oTs\|oAp\|oGs\|dGs\|dTs\|dGs\|dAs\|dTs\|dGs\|5mCs\|dAs\|5mCs\|dTs\|oGp\|o5mCp\|oTs\|oTs\|oTs\|oAs\|o5mCs\|oA] |
| 2026 | [oGs\|o5mCs\|oTp\|oAp\|oGs\|dGs\|dTs\|dGs\|dAs\|dTs\|dGs\|5mCs\|dAs\|5mCs\|dTs\|oGs\|o5mCp\|oTs\|oTs\|oTs\|oAs\|o5mCs\|oA] |
| 2027 | [oGs\|o5mCs\|oTp\|oAp\|oGs\|dGs\|dTs\|dGs\|dAs\|dTs\|dGs\|5mCs\|dAs\|5mCs\|dTs\|oGp\|o5mCs\|oTs\|oTs\|oTs\|oAs\|o5mCs\|oA] |
| 2028 | [oGs\|o5mCs\|oTp\|oAp\|oGs\|dGs\|dTs\|dGs\|dAs\|dTs\|dGs\|5mCs\|dAs\|5mCs\|dTs\|oGp\|o5mCp\|oTs\|oTs\|oTs\|oAs\|o5mCs\|oA] |
| 2029 | [oGs\|o5mCs\|oTs\|oAs\|oGs\|dGs\|dTs\|dGs\|dAs\|dTs\|dGs\|5mCs\|dAs\|5mCs\|dTs\|dGs\|o5mCs\|oTs\|oTs\|oTs\|oA] |
| 2030 | [oGs\|o5mCs\|oTp\|oAs\|oGs\|dGs\|dTs\|dGs\|dAs\|dTs\|dGs\|5mCs\|dAs\|5mCs\|dTs\|dGs\|o5mCs\|oTs\|oTs\|oTs\|oA] |
| 2031 | [oGs\|o5mCs\|oTs\|oAp\|oGs\|dGs\|dTs\|dGs\|dAs\|dTs\|dGs\|5mCs\|dAs\|5mCs\|dTs\|dGs\|o5mCs\|oTs\|oTs\|oTs\|oA] |
| 2032 | [oGs\|o5mCs\|oTp\|oAp\|oGs\|dGs\|dTs\|dGs\|dAs\|dTs\|dGs\|5mCs\|dAs\|5mCs\|dTs\|dGs\|o5mCs\|oTs\|oTs\|oTs\|oA] |
| 2033 | [oGs\|o5mCs\|oTs\|oAs\|oGs\|dGs\|dTs\|dGs\|dAs\|dTs\|dGs\|5mCs\|dAs\|5mCs\|dTs\|dGs\|o5mCp\|oTs\|oTs\|oTs\|oA] |
| 2034 | [oGs\|o5mCs\|oTs\|oAs\|oGs\|dGs\|dTs\|dGs\|dAs\|dTs\|dGs\|5mCs\|dAs\|5mCs\|dTs\|dGp\|o5mCs\|oTs\|oTs\|oTs\|oA] |
| 2035 | [oGs\|o5mCs\|oTs\|oAs\|oGs\|dGs\|dTs\|dGs\|dAs\|dTs\|dGs\|5mCs\|dAs\|5mCs\|dTs\|dGp\|o5mCp\|oTs\|oTs\|oTs\|oA] |
| 2036 | [oGs\|o5mCs\|oTp\|oAs\|oGs\|dGs\|dTs\|dGs\|dAs\|dTs\|dGs\|5mCs\|dAs\|5mCs\|dTs\|dGs\|o5mCp\|oTs\|oTs\|oTs\|oA] |
| 2037 | [oGs\|o5mCs\|oTp\|oAs\|oGs\|dGs\|dTs\|dGs\|dAs\|dTs\|dGs\|5mCs\|dAs\|5mCs\|dTs\|dGp\|o5mCs\|oTs\|oTs\|oTs\|oA] |
| 2038 | [oGs\|o5mCs\|oTs\|oAp\|oGs\|dGs\|dTs\|dGs\|dAs\|dTs\|dGs\|5mCs\|dAs\|5mCs\|dTs\|dGs\|o5mCp\|oTs\|oTs\|oTs\|oA] |
| 2039 | [oGs\|o5mCs\|oTs\|oAp\|oGs\|dGs\|dTs\|dGs\|dAs\|dTs\|dGs\|5mCs\|dAs\|5mCs\|dTs\|dGp\|o5mCs\|oTs\|oTs\|oTs\|oA] |
| 2040 | [oGs\|o5mCs\|oTp\|oAs\|oGs\|dGs\|dTs\|dGs\|dAs\|dTs\|dGs\|5mCs\|dAs\|5mCs\|dTs\|dGp\|o5mCp\|oTs\|oTs\|oTs\|oA] |
| 2041 | [oGs\|o5mCs\|oTs\|oAp\|oGs\|dGs\|dTs\|dGs\|dAs\|dTs\|dGs\|5mCs\|dAs\|5mCs\|dTs\|dGp\|o5mCp\|oTs\|oTs\|oTs\|oA] |
| 2042 | [oGs\|o5mCs\|oTp\|oAp\|oGs\|dGs\|dTs\|dGs\|dAs\|dTs\|dGs\|5mCs\|dAs\|5mCs\|dTs\|dGs\|o5mCp\|oTs\|oTs\|oTs\|oA] |
| 2043 | [oGs\|o5mCs\|oTp\|oAp\|oGs\|dGs\|dTs\|dGs\|dAs\|dTs\|dGs\|5mCs\|dAs\|5mCs\|dTs\|dGp\|o5mCs\|oTs\|oTs\|oTs\|oA] |
| 2044 | [oGs\|o5mCs\|oTp\|oAp\|oGs\|dGs\|dTs\|dGs\|dAs\|dTs\|dGs\|5mCs\|dAs\|5mCs\|dTs\|dGp\|o5mCp\|oTs\|oTs\|oTs\|oA] |
| 2045 | [oGs\|o5mCs\|oTs\|oAs\|oGs\|dGs\|dTs\|dGs\|dAs\|dTs\|dGs\|5mCs\|dAs\|5mCs\|dTs\|dGs\|5mCs\|oTs\|oTs\|oTs\|oAs\|o5mC] |
| 2046 | [oGs\|o5mCs\|oTp\|oAs\|oGs\|dGs\|dTs\|dGs\|dAs\|dTs\|dGs\|5mCs\|dAs\|5mCs\|dTs\|dGs\|5mCs\|oTs\|oTs\|oTs\|oAs\|o5mC] |
| 2047 | [oGs\|o5mCs\|oTs\|oAp\|oGs\|dGs\|dTs\|dGs\|dAs\|dTs\|dGs\|5mCs\|dAs\|5mCs\|dTs\|dGs\|5mCs\|oTs\|oTs\|oTs\|oAs\|o5mC] |
| 2048 | [oGs\|o5mCs\|oTp\|oAp\|oGs\|dGs\|dTs\|dGs\|dAs\|dTs\|dGs\|5mCs\|dAs\|5mCs\|dTs\|dGs\|5mCs\|oTs\|oTs\|oTs\|oAs\|o5mC] |
| 2049 | [oGs\|o5mCs\|oTs\|oAs\|oGs\|dGs\|dTs\|dGs\|dAs\|dTs\|dGs\|5mCs\|dAs\|5mCs\|dTs\|dGs\|5mCp\|oTs\|oTs\|oTs\|oAs\|o5mC] |
| 2050 | [oGs\|o5mCs\|oTs\|oAs\|oGs\|dGs\|dTs\|dGs\|dAs\|dTs\|dGs\|5mCs\|dAs\|5mCs\|dTs\|dGp\|5mCs\|oTs\|oTs\|oTs\|oAs\|o5mC] |
| 2051 | [oGs\|o5mCs\|oTs\|oAs\|oGs\|dGs\|dTs\|dGs\|dAs\|dTs\|dGs\|5mCs\|dAs\|5mCs\|dTs\|dGp\|5mCp\|oTs\|oTs\|oTs\|oAs\|o5mC] |
| 2052 | [oGs\|o5mCs\|oTp\|oAs\|oGs\|dGs\|dTs\|dGs\|dAs\|dTs\|dGs\|5mCs\|dAs\|5mCs\|dTs\|dGs\|5mCp\|oTs\|oTs\|oTs\|oAs\|o5mC] |
| 2053 | [oGs\|o5mCs\|oTp\|oAs\|oGs\|dGs\|dTs\|dGs\|dAs\|dTs\|dGs\|5mCs\|dAs\|5mCs\|dTs\|dGp\|5mCs\|oTs\|oTs\|oTs\|oAs\|o5mC] |
| 2054 | [oGs\|o5mCs\|oTs\|oAp\|oGs\|dGs\|dTs\|dGs\|dAs\|dTs\|dGs\|5mCs\|dAs\|5mCs\|dTs\|dGs\|5mCp\|oTs\|oTs\|oTs\|oAs\|o5mC] |
| 2055 | [oGs\|o5mCs\|oTs\|oAp\|oGs\|dGs\|dTs\|dGs\|dAs\|dTs\|dGs\|5mCs\|dAs\|5mCs\|dTs\|dGp\|5mCs\|oTs\|oTs\|oTs\|oAs\|o5mC] |
| 2056 | [oGs\|o5mCs\|oTp\|oAs\|oGs\|dGs\|dTs\|dGs\|dAs\|dTs\|dGs\|5mCs\|dAs\|5mCs\|dTs\|dGp\|5mCp\|oTs\|oTs\|oTs\|oAs\|o5mC] |
| 2057 | [oGs\|o5mCs\|oTs\|oAp\|oGs\|dGs\|dTs\|dGs\|dAs\|dTs\|dGs\|5mCs\|dAs\|5mCs\|dTs\|dGp\|5mCp\|oTs\|oTs\|oTs\|oAs\|o5mC] |
| 2058 | [oGs\|o5mCs\|oTp\|oAp\|oGs\|dGs\|dTs\|dGs\|dAs\|dTs\|dGs\|5mCs\|dAs\|5mCs\|dTs\|dGs\|5mCp\|oTs\|oTs\|oTs\|oAs\|o5mC] |
| 2059 | [oGs\|o5mCs\|oTp\|oAp\|oGs\|dGs\|dTs\|dGs\|dAs\|dTs\|dGs\|5mCs\|dAs\|5mCs\|dTs\|dGp\|5mCs\|oTs\|oTs\|oTs\|oAs\|o5mC] |
| 2060 | [oGs\|o5mCs\|oTp\|oAp\|oGs\|dGs\|dTs\|dGs\|dAs\|dTs\|dGs\|5mCs\|dAs\|5mCs\|dTs\|dGp\|5mCp\|oTs\|oTs\|oTs\|oAs\|o5mC] |
| 2061 | [o5mCs\|LAs\|oAs\|o5mCs\|oAs\|oGs\|oTs\|oTs\|dGs\|5mCs\|dTs\|dAs\|dGs\|dGs\|dTs\|dGs\|dAs\|dTs\|oGs\|o5mC] |
| 2062 | [o5mCs\|oAs\|LAs\|o5mCs\|oAs\|oGs\|oTs\|oTs\|dGs\|5mCs\|dTs\|dAs\|dGs\|dGs\|dTs\|dGs\|dAs\|dTs\|oGs\|o5mC] |
| 2063 | [o5mCs\|oAs\|oAs\|L5mCs\|oAs\|oGs\|oTs\|oTs\|dGs\|5mCs\|dTs\|dAs\|dGs\|dGs\|dTs\|dGs\|dAs\|dTs\|oGs\|o5mC] |
| 2064 | [o5mCs\|oAs\|oAs\|o5mCs\|LAs\|oGs\|oTs\|oTs\|dGs\|5mCs\|dTs\|dAs\|dGs\|dGs\|dTs\|dGs\|dAs\|dTs\|oGs\|o5mC] |
| 2065 | [o5mCs\|oAs\|oAs\|o5mCs\|oAs\|LGs\|oTs\|oTs\|dGs\|5mCs\|dTs\|dAs\|dGs\|dGs\|dTs\|dGs\|dAs\|dTs\|oGs\|o5mC] |
| 2066 | [o5mCs\|oAs\|oAs\|o5mCs\|oAs\|oGs\|LTs\|oTs\|dGs\|5mCs\|dTs\|dAs\|dGs\|dGs\|dTs\|dGs\|dAs\|dTs\|oGs\|o5mC] |
| 2067 | [o5mCs\|oAs\|dAs\|5mCs\|dAs\|dGs\|dTs\|dTs\|dGs\|5mCs\|dTs\|dAs\|oGs\|oGs\|oTs\|oGs\|oAs\|oTs\|LGs\|o5mC] |
| 2068 | [o5mCs\|oAs\|dAs\|5mCs\|dAs\|dGs\|dTs\|dTs\|dGs\|5mCs\|dTs\|dAs\|oGs\|oGs\|oTs\|oGs\|oAs\|LTs\|oGs\|o5mC] |
| 2069 | [o5mCs\|oAs\|dAs\|5mCs\|dAs\|dGs\|dTs\|dTs\|dGs\|5mCs\|dTs\|dAs\|oGs\|oGs\|oTs\|oGs\|LAs\|oTs\|oGs\|o5mC] |
| 2070 | [o5mCs\|oAs\|dAs\|5mCs\|dAs\|dGs\|dTs\|dTs\|dGs\|5mCs\|dTs\|dAs\|oGs\|oGs\|oTs\|LGs\|oAs\|oTs\|oGs\|o5mC] |
| 2071 | [o5mCs\|oAs\|dAs\|5mCs\|dAs\|dGs\|dTs\|dTs\|dGs\|5mCs\|dTs\|dAs\|oGs\|oGs\|LTs\|oGs\|oAs\|oTs\|oGs\|o5mC] |
| 2072 | [o5mCs\|oAs\|dAs\|5mCs\|dAs\|dGs\|dTs\|dTs\|dGs\|5mCs\|dTs\|dAs\|oGs\|LGs\|oTs\|oGs\|oAs\|oTs\|oGs\|o5mC] |
| 2073 | [o5mCs\|LAs\|oAs\|o5mCs\|oAs\|oGs\|oTs\|dTs\|dGs\|5mCs\|dTs\|dAs\|dGs\|dGs\|dTs\|dGs\|dAs\|oTs\|oGs\|o5mC] |
| 2074 | [o5mCs\|oAs\|LAs\|o5mCs\|oAs\|oGs\|oTs\|dTs\|dGs\|5mCs\|dTs\|dAs\|dGs\|dGs\|dTs\|dGs\|dAs\|oTs\|oGs\|o5mC] |
| 2075 | [o5mCs\|oAs\|oAs\|L5mCs\|oAs\|oGs\|oTs\|dTs\|dGs\|5mCs\|dTs\|dAs\|dGs\|dGs\|dTs\|dGs\|dAs\|oTs\|oGs\|o5mC] |
| 2076 | [o5mCs\|oAs\|oAs\|o5mCs\|LAs\|oGs\|oTs\|dTs\|dGs\|5mCs\|dTs\|dAs\|dGs\|dGs\|dTs\|dGs\|dAs\|oTs\|oGs\|o5mC] |
| 2077 | [o5mCs\|oAs\|oAs\|o5mCs\|oAs\|LGs\|oTs\|dTs\|dGs\|5mCs\|dTs\|dAs\|dGs\|dGs\|dTs\|dGs\|dAs\|oTs\|oGs\|o5mC] |
| 2078 | [o5mCs\|oAs\|oAs\|5mCs\|dAs\|dGs\|dTs\|dTs\|dGs\|5mCs\|dTs\|dAs\|dGs\|oGs\|oTs\|oGs\|oAs\|oTs\|LGs\|o5mC] |
| 2079 | [o5mCs\|oAs\|oAs\|5mCs\|dAs\|dGs\|dTs\|dTs\|dGs\|5mCs\|dTs\|dAs\|dGs\|oGs\|oTs\|oGs\|oAs\|LTs\|oGs\|o5mC] |
| 2080 | [o5mCs\|oAs\|oAs\|5mCs\|dAs\|dGs\|dTs\|dTs\|dGs\|5mCs\|dTs\|dAs\|dGs\|oGs\|oTs\|oGs\|LAs\|oTs\|oGs\|o5mC] |
| 2081 | [o5mCs\|oAs\|oAs\|5mCs\|dAs\|dGs\|dTs\|dTs\|dGs\|5mCs\|dTs\|dAs\|dGs\|oGs\|oTs\|LGs\|oAs\|oTs\|oGs\|o5mC] |
| 2082 | [o5mCs\|oAs\|oAs\|5mCs\|dAs\|dGs\|dTs\|dTs\|dGs\|5mCs\|dTs\|dAs\|dGs\|oGs\|LTs\|oGs\|oAs\|oTs\|oGs\|o5mC] |
| 2083 | [o5mCs\|LAs\|oAs\|o5mCs\|oAs\|oGs\|oTs\|dTs\|dGs\|5mCs\|dTs\|dAs\|dGs\|dGs\|dTs\|dGs\|dAs\|oTs\|oG] |
| 2084 | [o5mCs\|oAs\|LAs\|o5mCs\|oAs\|oGs\|oTs\|dTs\|dGs\|5mCs\|dTs\|dAs\|dGs\|dGs\|dTs\|dGs\|dAs\|oTs\|oG] |
| 2085 | [o5mCs\|oAs\|oAs\|L5mCs\|oAs\|oGs\|oTs\|dTs\|dGs\|5mCs\|dTs\|dAs\|dGs\|dGs\|dTs\|dGs\|dAs\|oTs\|oG] |
| 2086 | [o5mCs\|oAs\|oAs\|o5mCs\|LAs\|oGs\|oTs\|dTs\|dGs\|5mCs\|dTs\|dAs\|dGs\|dGs\|dTs\|dGs\|dAs\|oTs\|oG] |
| 2087 | [o5mCs\|oAs\|oAs\|o5mCs\|oAs\|LGs\|oTs\|dTs\|dGs\|5mCs\|dTs\|dAs\|dGs\|dGs\|dTs\|dGs\|dAs\|oTs\|oG] |
| 2088 | [oAs\|oAs\|5mCs\|dAs\|dGs\|dTs\|dTs\|dGs\|5mCs\|dTs\|dAs\|dGs\|oGs\|oTs\|oGs\|oAs\|oTs\|LGs\|o5mC] |
| 2089 | [oAs\|oAs\|5mCs\|dAs\|dGs\|dTs\|dTs\|dGs\|5mCs\|dTs\|dAs\|dGs\|oGs\|oTs\|oGs\|oAs\|LTs\|oGs\|o5mC] |
| 2090 | [oAs\|oAs\|5mCs\|dAs\|dGs\|dTs\|dTs\|dGs\|5mCs\|dTs\|dAs\|dGs\|oGs\|oTs\|oGs\|LAs\|oTs\|oGs\|o5mC] |
| 2091 | [oAs\|oAs\|5mCs\|dAs\|dGs\|dTs\|dTs\|dGs\|5mCs\|dTs\|dAs\|dGs\|oGs\|oTs\|LGs\|oAs\|oTs\|oGs\|o5mC] |
| 2092 | [oAs\|oAs\|5mCs\|dAs\|dGs\|dTs\|dTs\|dGs\|5mCs\|dTs\|dAs\|dGs\|oGs\|LTs\|oGs\|oAs\|oTs\|oGs\|o5mC] |
| 2093 | [o5mCs\|LAs\|oAs\|o5mCs\|oAs\|oGs\|dTs\|dTs\|dGs\|5mCs\|dTs\|dAs\|dGs\|dGs\|dTs\|dGs\|oAs\|oTs\|oGs\|o5mC] |
| 2094 | [o5mCs\|oAs\|LAs\|o5mCs\|oAs\|oGs\|dTs\|dTs\|dGs\|5mCs\|dTs\|dAs\|dGs\|dGs\|dTs\|dGs\|oAs\|oTs\|oGs\|o5mC] |
| 2095 | [o5mCs\|oAs\|oAs\|L5mCs\|oAs\|oGs\|dTs\|dTs\|dGs\|5mCs\|dTs\|dAs\|dGs\|dGs\|dTs\|dGs\|oAs\|oTs\|oGs\|o5mC] |
| 2096 | [o5mCs\|oAs\|oAs\|o5mCs\|LAs\|oGs\|dTs\|dTs\|dGs\|5mCs\|dTs\|dAs\|dGs\|dGs\|dTs\|dGs\|oAs\|oTs\|oGs\|o5mC] |
| 2097 | [o5mCs\|oAs\|oAs\|o5mCs\|dAs\|dGs\|dTs\|dTs\|dGs\|5mCs\|dTs\|dAs\|dGs\|dGs\|oTs\|oGs\|oAs\|oTs\|LGs\|o5mC] |
| 2098 | [o5mCs\|oAs\|oAs\|o5mCs\|dAs\|dGs\|dTs\|dTs\|dGs\|5mCs\|dTs\|dAs\|dGs\|dGs\|oTs\|oGs\|oAs\|LTs\|oGs\|o5mC] |
| 2099 | [o5mCs\|oAs\|oAs\|o5mCs\|dAs\|dGs\|dTs\|dTs\|dGs\|5mCs\|dTs\|dAs\|dGs\|dGs\|oTs\|oGs\|LAs\|oTs\|oGs\|o5mC] |
| 2100 | [o5mCs\|oAs\|oAs\|o5mCs\|dAs\|dGs\|dTs\|dTs\|dGs\|5mCs\|dTs\|dAs\|dGs\|dGs\|oTs\|LGs\|oAs\|oTs\|oGs\|o5mC] |
| 2101 | [o5mCs\|LAs\|oAs\|o5mCs\|oAs\|oGs\|dTs\|dTs\|dGs\|5mCs\|dTs\|dAs\|dGs\|dGs\|dTs\|dGs\|oAs\|oTs\|oG] |
| 2102 | [o5mCs\|oAs\|LAs\|o5mCs\|oAs\|oGs\|dTs\|dTs\|dGs\|5mCs\|dTs\|dAs\|dGs\|dGs\|dTs\|dGs\|oAs\|oTs\|oG] |
| 2103 | [o5mCs\|oAs\|oAs\|L5mCs\|oAs\|oGs\|dTs\|dTs\|dGs\|5mCs\|dTs\|dAs\|dGs\|dGs\|dTs\|dGs\|oAs\|oTs\|oG] |
| 2104 | [o5mCs\|oAs\|oAs\|o5mCs\|LAs\|oGs\|dTs\|dTs\|dGs\|5mCs\|dTs\|dAs\|dGs\|dGs\|dTs\|dGs\|oAs\|oTs\|oG] |
| 2105 | [o5mCs\|oAs\|oAs\|5mCs\|dAs\|dGs\|dTs\|dTs\|dGs\|5mCs\|dTs\|dAs\|dGs\|dGs\|oTs\|oGs\|oAs\|oTs\|LGs\|o5mC] |
| 2106 | [o5mCs\|oAs\|oAs\|5mCs\|dAs\|dGs\|dTs\|dTs\|dGs\|5mCs\|dTs\|dAs\|dGs\|dGs\|oTs\|oGs\|oAs\|LTs\|oGs\|o5mC] |
| 2107 | [o5mCs\|oAs\|oAs\|5mCs\|dAs\|dGs\|dTs\|dTs\|dGs\|5mCs\|dTs\|dAs\|dGs\|dGs\|oTs\|oGs\|LAs\|oTs\|oGs\|o5mC] |
| 2108 | [o5mCs\|LAs\|oAs\|o5mCs\|oAs\|oGs\|dTs\|dTs\|dGs\|5mCs\|dTs\|dAs\|dGs\|dGs\|dTs\|dGs\|oAs\|oT] |
| 2109 | [o5mCs\|oAs\|LAs\|o5mCs\|oAs\|oGs\|dTs\|dTs\|dGs\|5mCs\|dTs\|dAs\|dGs\|dGs\|dTs\|dGs\|oAs\|oT] |
| 2110 | [o5mCs\|oAs\|oAs\|L5mCs\|oAs\|oGs\|dTs\|dTs\|dGs\|5mCs\|dTs\|dAs\|dGs\|dGs\|dTs\|dGs\|oAs\|oT] |
| 2111 | [o5mCs\|oAs\|oAs\|o5mCs\|LAs\|oGs\|dTs\|dTs\|dGs\|5mCs\|dTs\|dAs\|dGs\|dGs\|dTs\|dGs\|oAs\|oT] |
| 2112 | [oAs\|o5mCs\|dAs\|dGs\|dTs\|dTs\|dGs\|5mCs\|dTs\|dAs\|dGs\|dGs\|oTs\|oGs\|oAs\|oTs\|LGs\|o5mC] |
| 2113 | [oAs\|o5mCs\|dAs\|dGs\|dTs\|dTs\|dGs\|5mCs\|dTs\|dAs\|dGs\|dGs\|oTs\|oGs\|oAs\|LTs\|oGs\|o5mC] |
| 2114 | [oAs\|o5mCs\|dAs\|dGs\|dTs\|dTs\|dGs\|5mCs\|dTs\|dAs\|dGs\|dGs\|oTs\|oGs\|LAs\|oTs\|oGs\|o5mC] |
| 2115 | [oAs\|o5mCs\|dAs\|dGs\|dTs\|dTs\|dGs\|5mCs\|dTs\|dAs\|dGs\|dGs\|oTs\|LGs\|oAs\|oTs\|oGs\|o5mC] |
| 2116 | [o5mCs\|LAs\|oAs\|o5mCs\|oAs\|dGs\|dTs\|dTs\|dGs\|5mCs\|dTs\|dAs\|dGs\|dGs\|dTs\|oGs\|oAs\|oTs\|oGs\|o5mC] |
| 2117 | [o5mCs\|oAs\|LAs\|o5mCs\|oAs\|dGs\|dTs\|dTs\|dGs\|5mCs\|dTs\|dAs\|dGs\|dGs\|dTs\|oGs\|oAs\|oTs\|oGs\|o5mC] |
| 2118 | [o5mCs\|oAs\|oAs\|L5mCs\|oAs\|dGs\|dTs\|dTs\|dGs\|5mCs\|dTs\|dAs\|dGs\|dGs\|dTs\|oGs\|oAs\|oTs\|oGs\|o5mC] |
| 2119 | [o5mCs\|oAs\|oAs\|o5mCs\|oAs\|dGs\|dTs\|dTs\|dGs\|5mCs\|dTs\|dAs\|dGs\|dGs\|dTs\|oGs\|oAs\|oTs\|LGs\|o5mC] |
| 2120 | [o5mCs\|oAs\|oAs\|o5mCs\|oAs\|dGs\|dTs\|dTs\|dGs\|5mCs\|dTs\|dAs\|dGs\|dGs\|dTs\|oGs\|oAs\|LTs\|oGs\|o5mC] |
| 2121 | [o5mCs\|oAs\|oAs\|o5mCs\|oAs\|dGs\|dTs\|dTs\|dGs\|5mCs\|dTs\|dAs\|dGs\|dGs\|dTs\|oGs\|LAs\|oTs\|oGs\|o5mC] |
| 2122 | [o5mCs\|LAs\|oAs\|o5mCs\|oAs\|dGs\|dTs\|dTs\|dGs\|5mCs\|dTs\|dAs\|dGs\|dGs\|dTs\|oGs\|oAs\|oTs\|oG] |
| 2123 | [o5mCs\|oAs\|LAs\|o5mCs\|oAs\|dGs\|dTs\|dTs\|dGs\|5mCs\|dTs\|dAs\|dGs\|dGs\|dTs\|oGs\|oAs\|oTs\|oG] |
| 2124 | [o5mCs\|oAs\|oAs\|L5mCs\|oAs\|dGs\|dTs\|dTs\|dGs\|5mCs\|dTs\|dAs\|dGs\|dGs\|dTs\|oGs\|oAs\|oTs\|oG] |
| 2125 | [oAs\|oAs\|o5mCs\|oAs\|dGs\|dTs\|dTs\|dGs\|5mCs\|dTs\|dAs\|dGs\|dGs\|dTs\|oGs\|oAs\|oTs\|LGs\|o5mC] |
| 2126 | [oAs\|oAs\|o5mCs\|oAs\|dGs\|dTs\|dTs\|dGs\|5mCs\|dTs\|dAs\|dGs\|dGs\|dTs\|oGs\|oAs\|LTs\|oGs\|o5mC] |
| 2127 | [oAs\|oAs\|o5mCs\|oAs\|dGs\|dTs\|dTs\|dGs\|5mCs\|dTs\|dAs\|dGs\|dGs\|dTs\|oGs\|LAs\|oTs\|oGs\|o5mC] |
| 2128 | [o5mCs\|LAs\|oAs\|o5mCs\|oAs\|dGs\|dTs\|dTs\|dGs\|5mCs\|dTs\|dAs\|dGs\|dGs\|dTs\|oGs\|oAs\|oT] |
| 2129 | [o5mCs\|oAs\|LAs\|o5mCs\|oAs\|dGs\|dTs\|dTs\|dGs\|5mCs\|dTs\|dAs\|dGs\|dGs\|dTs\|oGs\|oAs\|oT] |
| 2130 | [o5mCs\|oAs\|oAs\|L5mCs\|oAs\|dGs\|dTs\|dTs\|dGs\|5mCs\|dTs\|dAs\|dGs\|dGs\|dTs\|oGs\|oAs\|oT] |
| 2131 | [oAs\|o5mCs\|oAs\|dGs\|dTs\|dTs\|dGs\|5mCs\|dTs\|dAs\|dGs\|dGs\|dTs\|oGs\|oAs\|oTs\|LGs/o5mC] |
| 2132 | [oAs\|o5mCs\|oAs\|dGs\|dTs\|dTs\|dGs\|5mCs\|dTs\|dAs\|dGs\|dGs\|dTs\|oGs\|oAs\|LTs\|oGs\|o5mC] |
| 2133 | [oAs\|o5mCs\|oAs\|dGs\|dTs\|dTs\|dGs\|5mCs\|dTs\|dAs\|dGs\|dGs\|dTs\|oGs\|LAs\|oTs\|oGs\|o5mC] |
| 2134 | [o5mCs\|LAs\|oAs\|o5mCs\|oAs\|dGs\|dTs\|dTs\|dGs\|5mCs\|dTs\|dAs\|dGs\|dGs\|dTs\|oGs\|oA] |
| 2135 | [o5mCs\|oAs\|LAs\|o5mCs\|oAs\|dGs\|dTs\|dTs\|dGs\|5mCs\|dTs\|dAs\|dGs\|dGs\|dTs\|oGs\|oA] |
| 2136 | [o5mCs\|oAs\|oAs\|L5mCs\|oAs\|dGs\|dTs\|dTs\|dGs\|5mCs\|dTs\|dAs\|dGs\|dGs\|dTs\|oGs\|oA] |
| 2137 | [o5mCs\|oAs\|dGs\|dTs\|dTs\|dGs\|5mCs\|dTs\|dAs\|dGs\|dGs\|dTs\|oGs\|oAs\|oTs\|LGs\|o5mC] |
| 2138 | [o5mCs\|oAs\|dGs\|dTs\|dTs\|dGs\|5mCs\|dTs\|dAs\|dGs\|dGs\|dTs\|oGs\|oAs\|LTs\|oGs\|o5mC] |
| 2139 | [o5mCs\|oAs\|dGs\|dTs\|dTs\|dGs\|5mCs\|dTs\|dAs\|dGs\|dGs\|dTs\|oGs\|LAs\|oTs\|oGs\|o5mC] |
| 2140 | [oAs\|LAs\|o5mCs\|oAs\|dGs\|dTs\|dTs\|dGs\|5mCs\|dTs\|dAs\|dGs\|dGs\|dTs\|oGs\|oAs\|oTs\|oGs\|o5mC] |
| 2141 | [oAs\|oAs\|L5mCs\|oAs\|dGs\|dTs\|dTs\|dGs\|5mCs\|dTs\|dAs\|dGs\|dGs\|dTs\|oGs\|oAs\|oTs\|oGs\|o5mC] |
| 2142 | [o5mCs\|oAs\|oAs\|o5mCs\|oAs\|dGs\|dTs\|dTs\|dGs\|5mCs\|dTs\|dAs\|dGs\|dGs\|dTs\|oGs\|oAs\|LTs\|oG] |
| 2143 | [o5mCs\|oAs\|oAs\|o5mCs\|oAs\|dGs\|dTs\|dTs\|dGs\|5mCs\|dTs\|dAs\|dGs\|dGs\|dTs\|oGs\|LAs\|oTs\|oG] |
| 2144 | [oAs\|LAs\|o5mCs\|oAs\|dGs\|dTs\|dTs\|dGs\|5mCs\|dTs\|dAs\|dGs\|dGs\|dTs\|oGs\|oAs\|oTs\|oG] |
| 2145 | [oAs\|oAs\|L5mCs\|oAs\|dGs\|dTs\|dTs\|dGs\|5mCs\|dTs\|dAs\|dGs\|dGs\|dTs\|oGs\|oAs\|oTs\|oG] |
| 2146 | [oAs\|oAs\|o5mCs\|oAs\|dGs\|dTs\|dTs\|dGs\|5mCs\|dTs\|dAs\|dGs\|dGs\|dTs\|oGs\|oAs\|LTs\|oG] |
| 2147 | [oAs\|oAs\|o5mCs\|oAs\|dGs\|dTs\|dTs\|dGs\|5mCs\|dTs\|dAs\|dGs\|dGs\|dTs\|oGs\|LAs\|oTs\|oG] |
| 2148 | [oAs\|LAs\|o5mCs\|oAs\|dGs\|dTs\|dTs\|dGs\|5mCs\|dTs\|dAs\|dGs\|dGs\|dTs\|oGs\|oAs\|oT] |
| 2149 | [oAs\|oAs\|L5mCs\|oAs\|dGs\|dTs\|dTs\|dGs\|5mCs\|dTs\|dAs\|dGs\|dGs\|dTs\|oGs\|oAs\|oT] |
| 2150 | [oAs\|oAs\|o5mCs\|oAs\|dGs\|dTs\|dTs\|dGs\|5mCs\|dTs\|dAs\|dGs\|dGs\|dTs\|oGs\|LAs\|oT] |
| 2151 | [o5mCs\|oAs\|oAs\|o5mCs\|oAs\|oGs\|oTs\|oTs\|dGs\|5mCs\|dTs\|dAs\|dGs\|dGs\|dTs\|dGs\|dAs\|dTs\|oGs\|o5mC] |
| 2152 | [o5mCs\|oAs\|dAs\|5mCs\|dAs\|dGs\|dTs\|dTs\|dGs\|5mCs\|dTs\|dAs\|oGs\|oGs\|oTs\|oGs\|oAs\|oTs\|oGs\|o5mC] |
| 2153 | [o5mCs\|oAs\|oAs\|o5mCs\|oAs\|oGs\|oTs\|dTs\|dGs\|5mCs\|dTs\|dAs\|dGs\|dGs\|dTs\|dGs\|dAs\|oTs\|oGs\|o5mC] |
| 2154 | [o5mCs\|oAs\|oAs\|5mCs\|dAs\|dGs\|dTs\|dTs\|dGs\|5mCs\|dTs\|dAs\|dGs\|oGs\|oTs\|oGs\|oAs\|oTs\|oGs\|o5mC] |
| 2155 | [o5mCs\|oAs\|oAs\|o5mCs\|oAs\|oGs\|oTs\|dTs\|dGs\|5mCs\|dTs\|dAs\|dGs\|dGs\|dTs\|dGs\|dAs\|oTs\|oG] |
| 2156 | [oAs\|oAs\|5mCs\|dAs\|dGs\|dTs\|dTs\|dGs\|5mCs\|dTs\|dAs\|dGs\|oGs\|oTs\|oGs\|oAs\|oTs\|oGs\|o5mC] |
| 2157 | [o5mCs\|oAs\|oAs\|o5mCs\|oAs\|oGs\|dTs\|dTs\|dGs\|5mCs\|dTs\|dAs\|dGs\|dGs\|dTs\|dGs\|oAs\|oTs\|oGs\|o5mC] |
| 2158 | [o5mCs\|oAs\|oAs\|o5mCs\|dAs\|dGs\|dTs\|dTs\|dGs\|5mCs\|dTs\|dAs\|dGs\|dGs\|oTs\|oGs\|oAs\|oTs\|oGs\|o5mC] |
| 2159 | [o5mCs\|oAs\|oAs\|o5mCs\|oAs\|oGs\|dTs\|dTs\|dGs\|5mCs\|dTs\|dAs\|dGs\|dGs\|dTs\|dGs\|oAs\|oTs\|oG] |
| 2160 | [o5mCs\|oAs\|oAs\|5mCs\|dAs\|dGs\|dTs\|dTs\|dGs\|5mCs\|dTs\|dAs\|dGs\|dGs\|oTs\|oGs\|oAs\|oTs\|oGs\|o5mC] |
| 2161 | [o5mCs\|oAs\|oAs\|o5mCs\|oAs\|oGs\|dTs\|dTs\|dGs\|5mCs\|dTs\|dAs\|dGs\|dGs\|dTs\|dGs\|oAs\|oT] |
| 2162 | [oAs\|o5mCs\|dAs\|dGs\|dTs\|dTs\|dGs\|5mCs\|dTs\|dAs\|dGs\|dGs\|oTs\|oGs\|oAs\|oTs\|oGs\|o5mC] |
| 2163 | [o5mCs\|oAs\|oAs\|o5mCs\|oAs\|dGs\|dTs\|dTs\|dGs\|5mCs\|dTs\|dAs\|dGs\|dGs\|dTs\|oGs\|oAs\|oTs\|oGs\|o5mC] |
| 2164 | [o5mCs\|oAs\|oAs\|o5mCs\|oAs\|dGs\|dTs\|dTs\|dGs\|5mCs\|dTs\|dAs\|dGs\|dGs\|dTs\|oGs\|oAs\|oTs\|oG] |
| 2165 | [o5mCs\|oAs\|oAs\|o5mCs\|oAs\|dGs\|dTs\|dTs\|dGs\|5mCs\|dTs\|dAs\|dGs\|dGs\|dTs\|oGs\|oAs\|oT] |
| 2166 | [oAs\|o5mCs\|oAs\|dGs\|dTs\|dTs\|dGs\|5mCs\|dTs\|dAs\|dGs\|dGs\|dTs\|oGs\|oAs\|oTs\|oGs\|o5mC] |
| 2167 | [o5mCs\|oAs\|oAs\|o5mCs\|oAs\|dGs\|dTs\|dTs\|dGs\|5mCs\|dTs\|dAs\|dGs\|dGs\|dTs\|oGs\|oA] |
| 2168 | [o5mCs\|oAs\|dGs\|dTs\|dTs\|dGs\|5mCs\|dTs\|dAs\|dGs\|dGs\|dTs\|oGs\|oAs\|oTs\|oGs\|o5mC] |
| 2169 | [oAs\|oAs\|o5mCs\|oAs\|dGs\|dTs\|dTs\|dGs\|5mCs\|dTs\|dAs\|dGs\|dGs\|dTs\|oGs\|oAs\|oTs\|oGs\|o5mC] |
| 2170 | [oAs\|oAs\|o5mCs\|oAs\|dGs\|dTs\|dTs\|dGs\|5mCs\|dTs\|dAs\|dGs\|dGs\|dTs\|oGs\|oAs\|oTs\|oG] |
| 2171 | [oAs\|oAs\|o5mCs\|oAs\|dGs\|dTs\|dTs\|dGs\|5mCs\|dTs\|dAs\|dGs\|dGs\|dTs\|oGs\|oAs\|oT] |
| 2172 | [o5mCs\|oAs\|oAp\|o5mCs\|oAs\|dGs\|dTs\|dTs\|dGs\|5mCs\|dTs\|dAs\|dGs\|dGs\|dTs\|oGs\|oAs\|oTs\|oGs\|o5mC] |
| 2173 | [o5mCs\|oAs\|oAs\|o5mCp\|oAs\|dGs\|dTs\|dTs\|dGs\|5mCs\|dTs\|dAs\|dGs\|dGs\|dTs\|oGs\|oAs\|oTs\|oGs\|o5mC] |
| 2174 | [o5mCs\|oAs\|oAp\|o5mCp\|oAs\|dGs\|dTs\|dTs\|dGs\|5mCs\|dTs\|dAs\|dGs\|dGs\|dTs\|oGs\|oAs\|oTs\|oGs\|o5mC] |
| 2175 | [o5mCs\|oAs\|oAs\|o5mCs\|oAs\|dGs\|dTs\|dTs\|dGs\|5mCs\|dTs\|dAs\|dGs\|dGs\|dTs\|oGs\|oAp\|oTs\|oGs\|o5mC] |
| 2176 | [o5mCs\|oAs\|oAs\|o5mCs\|oAs\|dGs\|dTs\|dTs\|dGs\|5mCs\|dTs\|dAs\|dGs\|dGs\|dTs\|oGp\|oAs\|oTs\|oGs\|o5mC] |
| 2177 | [o5mCs\|oAs\|oAs\|o5mCs\|oAs\|dGs\|dTs\|dTs\|dGs\|5mCs\|dTs\|dAs\|dGs\|dGs\|dTs\|oGp\|oAp\|oTs\|oGs\|o5mC] |
| 2178 | [o5mCs\|oAs\|oAp\|o5mCs\|oAs\|dGs\|dTs\|dTs\|dGs\|5mCs\|dTs\|dAs\|dGs\|dGs\|dTs\|oGs\|oAp\|oTs\|oGs\|o5mC] |
| 2179 | [o5mCs\|oAs\|oAp\|o5mCs\|oAs\|dGs\|dTs\|dTs\|dGs\|5mCs\|dTs\|dAs\|dGs\|dGs\|dTs\|oGp\|oAs\|oTs\|oGs\|o5mC] |
| 2180 | [o5mCs\|oAs\|oAs\|o5mCp\|oAs\|dGs\|dTs\|dTs\|dGs\|5mCs\|dTs\|dAs\|dGs\|dGs\|dTs\|oGs\|oAp\|oTs\|oGs\|o5mC] |
| 2181 | [o5mCs\|oAs\|oAs\|o5mCp\|oAs\|dGs\|dTs\|dTs\|dGs\|5mCs\|dTs\|dAs\|dGs\|dGs\|dTs\|oGp\|oAs\|oTs\|oGs\|o5mC] |
| 2182 | [o5mCs\|oAs\|oAp\|o5mCs\|oAs\|dGs\|dTs\|dTs\|dGs\|5mCs\|dTs\|dAs\|dGs\|dGs\|dTs\|oGp\|oAp\|oTs\|oGs\|o5mC] |
| 2183 | [o5mCs\|oAs\|oAs\|o5mCp\|oAs\|dGs\|dTs\|dTs\|dGs\|5mCs\|dTs\|dAs\|dGs\|dGs\|dTs\|oGp\|oAp\|oTs\|oGs\|o5mC] |
| 2184 | [o5mCs\|oAs\|oAp\|o5mCp\|oAs\|dGs\|dTs\|dTs\|dGs\|5mCs\|dTs\|dAs\|dGs\|dGs\|dTs\|oGs\|oAp\|oTs\|oGs\|o5mC] |
| 2185 | [o5mCs\|oAs\|oAp\|o5mCp\|oAs\|dGs\|dTs\|dTs\|dGs\|5mCs\|dTs\|dAs\|dGs\|dGs\|dTs\|oGp\|oAs\|oTs\|oGs\|o5mC] |
| 2186 | [o5mCs\|oAs\|oAp\|o5mCp\|oAs\|dGs\|dTs\|dTs\|dGs\|5mCs\|dTs\|dAs\|dGs\|dGs\|dTs\|oGp\|oAp\|oTs\|oGs\|o5mC] |
| 2187 | [o5mCs\|oAs\|oAs\|o5mCs\|oAs\|dGs\|dTs\|dTs\|dGs\|5mCs\|dTs\|dAs\|dGs\|dGs\|dTs\|oGs\|oAs\|oTs\|oGs\|o5mCs\|oA] |
| 2188 | [o5mCs\|oAs\|oAp\|o5mCs\|oAs\|dGs\|dTs\|dTs\|dGs\|5mCs\|dTs\|dAs\|dGs\|dGs\|dTs\|oGs\|oAs\|oTs\|oGs\|o5mCs\|oA] |
| 2189 | [o5mCs\|oAs\|oAs\|o5mCp\|oAs\|dGs\|dTs\|dTs\|dGs\|5mCs\|dTs\|dAs\|dGs\|dGs\|dTs\|oGs\|oAs\|oTs\|oGs\|o5mCs\|oA] |
| 2190 | [o5mCs\|oAs\|oAp\|o5mCp\|oAs\|dGs\|dTs\|dTs\|dGs\|5mCs\|dTs\|dAs\|dGs\|dGs\|dTs\|oGs\|oAs\|oTs\|oGs\|o5mCs\|oA] |
| 2191 | [o5mCs\|oAs\|oAs\|o5mCs\|oAs\|dGs\|dTs\|dTs\|dGs\|5mCs\|dTs\|dAs\|dGs\|dGs\|dTs\|oGs\|oAp\|oTs\|oGs\|o5mCs\|oA] |
| 2192 | [o5mCs\|oAs\|oAs\|o5mCs\|oAs\|dGs\|dTs\|dTs\|dGs\|5mCs\|dTs\|dAs\|dGs\|dGs\|dTs\|oGp\|oAs\|oTs\|oGs\|o5mCs\|oA] |
| 2193 | [o5mCs\|oAs\|oAs\|o5mCs\|oAs\|dGs\|dTs\|dTs\|dGs\|5mCs\|dTs\|dAs\|dGs\|dGs\|dTs\|oGp\|oAp\|oTs\|oGs\|o5mCs\|oA] |
| 2194 | [o5mCs\|oAs\|oAp\|o5mCs\|oAs\|dGs\|dTs\|dTs\|dGs\|5mCs\|dTs\|dAs\|dGs\|dGs\|dTs\|oGs\|oAp\|oTs\|oGs\|o5mCs\|oA] |
| 2195 | [o5mCs\|oAs\|oAp\|o5mCs\|oAs\|dGs\|dTs\|dTs\|dGs\|5mCs\|dTs\|dAs\|dGs\|dGs\|dTs\|oGp\|oAs\|oTs\|oGs\|o5mCs\|oA] |
| 2196 | [o5mCs\|oAs\|oAs\|o5mCp\|oAs\|dGs\|dTs\|dTs\|dGs\|5mCs\|dTs\|dAs\|dGs\|dGs\|dTs\|oGs\|oAp\|oTs\|oGs\|o5mCs\|oA] |
| 2197 | [o5mCs\|oAs\|oAs\|o5mCp\|oAs\|dGs\|dTs\|dTs\|dGs\|5mCs\|dTs\|dAs\|dGs\|dGs\|dTs\|oGp\|oAs\|oTs\|oGs\|o5mCs\|oA] |
| 2198 | [o5mCs\|oAs\|oAp\|o5mCs\|oAs\|dGs\|dTs\|dTs\|dGs\|5mCs\|dTs\|dAs\|dGs\|dGs\|dTs\|oGp\|oAp\|oTs\|oGs\|o5mCs\|oA] |
| 2199 | [o5mCs\|oAs\|oAs\|o5mCp\|oAs\|dGs\|dTs\|dTs\|dGs\|5mCs\|dTs\|dAs\|dGs\|dGs\|dTs\|oGp\|oAp\|oTs\|oGs\|o5mCs\|oA] |
| 2200 | [o5mCs\|oAs\|oAp\|o5mCp\|oAs\|dGs\|dTs\|dTs\|dGs\|5mCs\|dTs\|dAs\|dGs\|dGs\|dTs\|oGs\|oAp\|oTs\|oGs\|o5mCs\|oA] |
| 2201 | [o5mCs\|oAs\|oAp\|o5mCp\|oAs\|dGs\|dTs\|dTs\|dGs\|5mCs\|dTs\|dAs\|dGs\|dGs\|dTs\|oGp\|oAs\|oTs\|oGs\|o5mCs\|oA] |
| 2202 | [o5mCs\|oAs\|oAp\|o5mCp\|oAs\|dGs\|dTs\|dTs\|dGs\|5mCs\|dTs\|dAs\|dGs\|dGs\|dTs\|oGp\|oAp\|oTs\|oGs\|o5mCs\|oA] |
| 2203 | [o5mCs\|oAs\|oAs\|o5mCs\|oAs\|dGs\|dTs\|dTs\|dGs\|5mCs\|dTs\|dAs\|dGs\|dGs\|dTs\|oGs\|oAs\|oTs\|oGs\|o5mCs\|oAs\|o5mC] |
| 2204 | [o5mCs\|oAs\|oAp\|o5mCs\|oAs\|dGs\|dTs\|dTs\|dGs\|5mCs\|dTs\|dAs\|dGs\|dGs\|dTs\|oGs\|oAs\|oTs\|oGs\|o5mCs\|oAs\|o5mC] |
| 2205 | [o5mCs\|oAs\|oAs\|o5mCp\|oAs\|dGs\|dTs\|dTs\|dGs\|5mCs\|dTs\|dAs\|dGs\|dGs\|dTs\|oGs\|oAs\|oTs\|oGs\|o5mCs\|oAs\|o5mC] |
| 2206 | [o5mCs\|oAs\|oAp\|o5mCp\|oAs\|dGs\|dTs\|dTs\|dGs\|5mCs\|dTs\|dAs\|dGs\|dGs\|dTs\|oGs\|oAs\|oTs\|oGs\|o5mCs\|oAs\|o5mC] |
| 2207 | [o5mCs\|oAs\|oAs\|o5mCs\|oAs\|dGs\|dTs\|dTs\|dGs\|5mCs\|dTs\|dAs\|dGs\|dGs\|dTs\|oGs\|oAp\|oTs\|oGs\|o5mCs\|oAs\|o5mC] |
| 2208 | [o5mCs\|oAs\|oAs\|o5mCs\|oAs\|dGs\|dTs\|dTs\|dGs\|5mCs\|dTs\|dAs\|dGs\|dGs\|dTs\|oGp\|oAs\|oTs\|oGs\|o5mCs\|oAs\|o5mC] |
| 2209 | [o5mCs\|oAs\|oAs\|o5mCs\|oAs\|dGs\|dTs\|dTs\|dGs\|5mCs\|dTs\|dAs\|dGs\|dGs\|dTs\|oGp\|oAp\|oTs\|oGs\|o5mCs\|oAs\|o5mC] |
| 2210 | [o5mCs\|oAs\|oAp\|o5mCs\|oAs\|dGs\|dTs\|dTs\|dGs\|5mCs\|dTs\|dAs\|dGs\|dGs\|dTs\|oGs\|oAp\|oTs\|oGs\|o5mCs\|oAs\|o5mC] |
| 2211 | [o5mCs\|oAs\|oAp\|o5mCs\|oAs\|dGs\|dTs\|dTs\|dGs\|5mCs\|dTs\|dAs\|dGs\|dGs\|dTs\|oGp\|oAs\|oTs\|oGs\|o5mCs\|oAs\|o5mC] |
| 2212 | [o5mCs\|oAs\|oAs\|o5mCp\|oAs\|dGs\|dTs\|dTs\|dGs\|5mCs\|dTs\|dAs\|dGs\|dGs\|dTs\|oGs\|oAp\|oTs\|oGs\|o5mCs\|oAs\|o5mC] |
| 2213 | [o5mCs\|oAs\|oAs\|o5mCp\|oAs\|dGs\|dTs\|dTs\|dGs\|5mCs\|dTs\|dAs\|dGs\|dGs\|dTs\|oGp\|oAs\|oTs\|oGs\|o5mCs\|oAs\|o5mC] |
| 2214 | [o5mCs\|oAs\|oAp\|o5mCs\|oAs\|dGs\|dTs\|dTs\|dGs\|5mCs\|dTs\|dAs\|dGs\|dGs\|dTs\|oGp\|oAp\|oTs\|oGs\|o5mCs\|oAs\|o5mC] |
| 2215 | [o5mCs\|oAs\|oAs\|o5mCp\|oAs\|dGs\|dTs\|dTs\|dGs\|5mCs\|dTs\|dAs\|dGs\|dGs\|dTs\|oGp\|oAp\|oTs\|oGs\|o5mCs\|oAs\|o5mC] |
| 2216 | [o5mCs\|oAs\|oAp\|o5mCp\|oAs\|dGs\|dTs\|dTs\|dGs\|5mCs\|dTs\|dAs\|dGs\|dGs\|dTs\|oGs\|oAp\|oTs\|oGs\|o5mCs\|oAs\|o5mC] |
| 2217 | [o5mCs\|oAs\|oAp\|o5mCp\|oAs\|dGs\|dTs\|dTs\|dGs\|5mCs\|dTs\|dAs\|dGs\|dGs\|dTs\|oGp\|oAs\|oTs\|oGs\|o5mCs\|oAs\|o5mC] |
| 2218 | [o5mCs\|oAs\|oAp\|o5mCp\|oAs\|dGs\|dTs\|dTs\|dGs\|5mCs\|dTs\|dAs\|dGs\|dGs\|dTs\|oGp\|oAp\|oTs\|oGs\|o5mCs\|oAs\|o5mC] |
| 2219 | [o5mCs\|oAs\|oAs\|o5mCs\|oAs\|dGs\|dTs\|dTs\|dGs\|5mCs\|dTs\|dAs\|dGs\|dGs\|dTs\|oGs\|oAs\|oTs\|oGs\|o5mCs\|oAs\|o5mCs\|oT] |
| 2220 | [o5mCs\|oAs\|oAp\|o5mCs\|oAs\|dGs\|dTs\|dTs\|dGs\|5mCs\|dTs\|dAs\|dGs\|dGs\|dTs\|oGs\|oAs\|oTs\|oGs\|o5mCs\|oAs\|o5mCs\|oT] |
| 2221 | [o5mCs\|oAs\|oAs\|o5mCp\|oAs\|dGs\|dTs\|dTs\|dGs\|5mCs\|dTs\|dAs\|dGs\|dGs\|dTs\|oGs\|oAs\|oTs\|oGs\|o5mCs\|oAs\|o5mCs\|oT] |
| 2222 | [o5mCs\|oAs\|oAp\|o5mCp\|oAs\|dGs\|dTs\|dTs\|dGs\|5mCs\|dTs\|dAs\|dGs\|dGs\|dTs\|oGs\|oAs\|oTs\|oGs\|o5mCs\|oAs\|o5mCs\|oT] |
| 2223 | [o5mCs\|oAs\|oAs\|o5mCs\|oAs\|dGs\|dTs\|dTs\|dGs\|5mCs\|dTs\|dAs\|dGs\|dGs\|dTs\|oGs\|oAp\|oTs\|oGs\|o5mCs\|oAs\|o5mCs\|oT] |
| 2224 | [o5mCs\|oAs\|oAs\|o5mCs\|oAs\|dGs\|dTs\|dTs\|dGs\|5mCs\|dTs\|dAs\|dGs\|dGs\|dTs\|oGp\|oAs\|oTs\|oGs\|o5mCs\|oAs\|o5mCs\|oT] |
| 2225 | [o5mCs\|oAs\|oAs\|o5mCs\|oAs\|dGs\|dTs\|dTs\|dGs\|5mCs\|dTs\|dAs\|dGs\|dGs\|dTs\|oGp\|oAp\|oTs\|oGs\|o5mCs\|oAs\|o5mCs\|oT] |
| 2226 | [o5mCs\|oAs\|oAp\|o5mCs\|oAs\|dGs\|dTs\|dTs\|dGs\|5mCs\|dTs\|dAs\|dGs\|dGs\|dTs\|oGs\|oAp\|oTs\|oGs\|o5mCs\|oAs\|o5mCs\|oT] |
| 2227 | [o5mCs\|oAs\|oAp\|o5mCs\|oAs\|dGs\|dTs\|dTs\|dGs\|5mCs\|dTs\|dAs\|dGs\|dGs\|dTs\|oGp\|oAs\|oTs\|oGs\|o5mCs\|oAs\|o5mCs\|oT] |
| 2228 | [o5mCs\|oAs\|oAs\|o5mCp\|oAs\|dGs\|dTs\|dTs\|dGs\|5mCs\|dTs\|dAs\|dGs\|dGs\|dTs\|oGs\|oAp\|oTs\|oGs\|o5mCs\|oAs\|o5mCs\|oT] |
| 2229 | [o5mCs\|oAs\|oAs\|o5mCp\|oAs\|dGs\|dTs\|dTs\|dGs\|5mCs\|dTs\|dAs\|dGs\|dGs\|dTs\|oGp\|oAs\|oTs\|oGs\|o5mCs\|oAs\|o5mCs\|oT] |
| 2230 | [o5mCs\|oAs\|oAp\|o5mCs\|oAs\|dGs\|dTs\|dTs\|dGs\|5mCs\|dTs\|dAs\|dGs\|dGs\|dTs\|oGp\|oAp\|oTs\|oGs\|o5mCs\|oAs\|o5mCs\|oT] |
| 2231 | [o5mCs\|oAs\|oAs\|o5mCp\|oAs\|dGs\|dTs\|dTs\|dGs\|5mCs\|dTs\|dAs\|dGs\|dGs\|dTs\|oGp\|oAp\|oTs\|oGs\|o5mCs\|oAs\|o5mCs\|oT] |
| 2232 | [o5mCs\|oAs\|oAp\|o5mCp\|oAs\|dGs\|dTs\|dTs\|dGs\|5mCs\|dTs\|dAs\|dGs\|dGs\|dTs\|oGs\|oAp\|oTs\|oGs\|o5mCs\|oAs\|o5mCs\|oT] |
| 2233 | [o5mCs\|oAs\|oAp\|o5mCp\|oAs\|dGs\|dTs\|dTs\|dGs\|5mCs\|dTs\|dAs\|dGs\|dGs\|dTs\|oGp\|oAs\|oTs\|oGs\|o5mCs\|oAs\|o5mCs\|oT] |
| 2234 | [o5mCs\|oAs\|oAp\|o5mCp\|oAs\|dGs\|dTs\|dTs\|dGs\|5mCs\|dTs\|dAs\|dGs\|dGs\|dTs\|oGp\|oAp\|oTs\|oGs\|o5mCs\|oAs\|o5mCs\|oT] |
| 2235 | [o5mCs\|oAs\|oAs\|o5mCs\|oAs\|dGs\|dTs\|dTs\|dGs\|5mCs\|dTs\|dAs\|dGs\|dGs\|dTs\|dGs\|oAs\|oTs\|oGs\|o5mCs\|oA] |
| 2236 | [o5mCs\|oAs\|oAp\|o5mCs\|oAs\|dGs\|dTs\|dTs\|dGs\|5mCs\|dTs\|dAs\|dGs\|dGs\|dTs\|dGs\|oAs\|oTs\|oGs\|o5mCs\|oA] |
| 2237 | [o5mCs\|oAs\|oAs\|o5mCp\|oAs\|dGs\|dTs\|dTs\|dGs\|5mCs\|dTs\|dAs\|dGs\|dGs\|dTs\|dGs\|oAs\|oTs\|oGs\|o5mCs\|oA] |
| 2238 | [o5mCs\|oAs\|oAp\|o5mCp\|oAs\|dGs\|dTs\|dTs\|dGs\|5mCs\|dTs\|dAs\|dGs\|dGs\|dTs\|dGs\|oAs\|oTs\|oGs\|o5mCs\|oA] |
| 2239 | [o5mCs\|oAs\|oAs\|o5mCs\|oAs\|dGs\|dTs\|dTs\|dGs\|5mCs\|dTs\|dAs\|dGs\|dGs\|dTs\|dGs\|oAp\|oTs\|oGs\|o5mCs\|oA] |
| 2240 | [o5mCs\|oAs\|oAs\|o5mCs\|oAs\|dGs\|dTs\|dTs\|dGs\|5mCs\|dTs\|dAs\|dGs\|dGs\|dTs\|dGp\|oAs\|oTs\|oGs\|o5mCs\|oA] |
| 2241 | [o5mCs\|oAs\|oAs\|o5mCs\|oAs\|dGs\|dTs\|dTs\|dGs\|5mCs\|dTs\|dAs\|dGs\|dGs\|dTs\|dGp\|oAp\|oTs\|oGs\|o5mCs\|oA] |
| 2242 | [o5mCs\|oAs\|oAp\|o5mCs\|oAs\|dGs\|dTs\|dTs\|dGs\|5mCs\|dTs\|dAs\|dGs\|dGs\|dTs\|dGs\|oAp\|oTs\|oGs\|o5mCs\|oA] |
| 2243 | [o5mCs\|oAs\|oAp\|o5mCs\|oAs\|dGs\|dTs\|dTs\|dGs\|5mCs\|dTs\|dAs\|dGs\|dGs\|dTs\|dGp\|oAs\|oTs\|oGs\|o5mCs\|oA] |
| 2244 | [o5mCs\|oAs\|oAs\|o5mCp\|oAs\|dGs\|dTs\|dTs\|dGs\|5mCs\|dTs\|dAs\|dGs\|dGs\|dTs\|dGs\|oAp\|oTs\|oGs\|o5mCs\|oA] |
| 2245 | [o5mCs\|oAs\|oAs\|o5mCp\|oAs\|dGs\|dTs\|dTs\|dGs\|5mCs\|dTs\|dAs\|dGs\|dGs\|dTs\|dGp\|oAs\|oTs\|oGs\|o5mCs\|oA] |
| 2246 | [o5mCs\|oAs\|oAp\|o5mCs\|oAs\|dGs\|dTs\|dTs\|dGs\|5mCs\|dTs\|dAs\|dGs\|dGs\|dTs\|dGp\|oAp\|oTs\|oGs\|o5mCs\|oA] |
| 2247 | [o5mCs\|oAs\|oAs\|o5mCp\|oAs\|dGs\|dTs\|dTs\|dGs\|5mCs\|dTs\|dAs\|dGs\|dGs\|dTs\|dGp\|oAp\|oTs\|oGs\|o5mCs\|oA] |
| 2248 | [o5mCs\|oAs\|oAp\|o5mCp\|oAs\|dGs\|dTs\|dTs\|dGs\|5mCs\|dTs\|dAs\|dGs\|dGs\|dTs\|dGs\|oAp\|oTs\|oGs\|o5mCs\|oA] |
| 2249 | [o5mCs\|oAs\|oAp\|o5mCp\|oAs\|dGs\|dTs\|dTs\|dGs\|5mCs\|dTs\|dAs\|dGs\|dGs\|dTs\|dGp\|oAs\|oTs\|oGs\|o5mCs\|oA] |
| 2250 | [o5mCs\|oAs\|oAp\|o5mCp\|oAs\|dGs\|dTs\|dTs\|dGs\|5mCs\|dTs\|dAs\|dGs\|dGs\|dTs\|dGp\|oAp\|oTs\|oGs\|o5mCs\|oA] |
| 2251 | [o5mCs\|oAs\|oAs\|o5mCs\|oAs\|dGs\|dTs\|dTs\|dGs\|5mCs\|dTs\|dAs\|dGs\|dGs\|dTs\|dGs\|dAs\|oTs\|oGs\|o5mCs\|oAs\|o5mC] |
| 2252 | [o5mCs\|oAs\|oAp\|o5mCs\|oAs\|dGs\|dTs\|dTs\|dGs\|5mCs\|dTs\|dAs\|dGs\|dGs\|dTs\|dGs\|dAs\|oTs\|oGs\|o5mCs\|oAs\|o5mC] |
| 2253 | [o5mCs\|oAs\|oAs\|o5mCp\|oAs\|dGs\|dTs\|dTs\|dGs\|5mCs\|dTs\|dAs\|dGs\|dGs\|dTs\|dGs\|dAs\|oTs\|oGs\|o5mCs\|oAs\|o5mC] |
| 2254 | [o5mCs\|oAs\|oAp\|o5mCp\|oAs\|dGs\|dTs\|dTs\|dGs\|5mCs\|dTs\|dAs\|dGs\|dGs\|dTs\|dGs\|dAs\|oTs\|oGs\|o5mCs\|oAs\|o5mC] |
| 2255 | [o5mCs\|oAs\|oAs\|o5mCs\|oAs\|dGs\|dTs\|dTs\|dGs\|5mCs\|dTs\|dAs\|dGs\|dGs\|dTs\|dGs\|dAp\|oTs\|oGs\|o5mCs\|oAs\|o5mC] |
| 2256 | [o5mCs\|oAs\|oAs\|o5mCs\|oAs\|dGs\|dTs\|dTs\|dGs\|5mCs\|dTs\|dAs\|dGs\|dGs\|dTs\|dGp\|dAs\|oTs\|oGs\|o5mCs\|oAs\|o5mC] |
| 2257 | [o5mCs\|oAs\|oAs\|o5mCs\|oAs\|dGs\|dTs\|dTs\|dGs\|5mCs\|dTs\|dAs\|dGs\|dGs\|dTs\|dGp\|dAp\|oTs\|oGs\|o5mCs\|oAs\|o5mC] |
| 2258 | [o5mCs\|oAs\|oAp\|o5mCs\|oAs\|dGs\|dTs\|dTs\|dGs\|5mCs\|dTs\|dAs\|dGs\|dGs\|dTs\|dGs\|dAp\|oTs\|oGs\|o5mCs\|oAs\|o5mC] |
| 2259 | [o5mCs\|oAs\|oAp\|o5mCs\|oAs\|dGs\|dTs\|dTs\|dGs\|5mCs\|dTs\|dAs\|dGs\|dGs\|dTs\|dGp\|dAs\|oTs\|oGs\|o5mCs\|oAs\|o5mC] |
| 2260 | [o5mCs\|oAs\|oAs\|o5mCp\|oAs\|dGs\|dTs\|dTs\|dGs\|5mCs\|dTs\|dAs\|dGs\|dGs\|dTs\|dGs\|dAp\|oTs\|oGs\|o5mCs\|oAs\|o5mC] |
| 2261 | [o5mCs\|oAs\|oAs\|o5mCp\|oAs\|dGs\|dTs\|dTs\|dGs\|5mCs\|dTs\|dAs\|dGs\|dGs\|dTs\|dGp\|dAs\|oTs\|oGs\|o5mCs\|oAs\|o5mC] |
| 2262 | [o5mCs\|oAs\|oAp\|o5mCs\|oAs\|dGs\|dTs\|dTs\|dGs\|5mCs\|dTs\|dAs\|dGs\|dGs\|dTs\|dGp\|dAp\|oTs\|oGs\|o5mCs\|oAs\|o5mC] |
| 2263 | [o5mCs\|oAs\|oAs\|o5mCp\|oAs\|dGs\|dTs\|dTs\|dGs\|5mCs\|dTs\|dAs\|dGs\|dGs\|dTs\|dGp\|dAp\|oTs\|oGs\|o5mCs\|oAs\|o5mC] |
| 2264 | [o5mCs\|oAs\|oAp\|o5mCp\|oAs\|dGs\|dTs\|dTs\|dGs\|5mCs\|dTs\|dAs\|dGs\|dGs\|dTs\|dGs\|dAp\|oTs\|oGs\|o5mCs\|oAs\|o5mC] |
| 2265 | [o5mCs\|oAs\|oAp\|o5mCp\|oAs\|dGs\|dTs\|dTs\|dGs\|5mCs\|dTs\|dAs\|dGs\|dGs\|dTs\|dGp\|dAs\|oTs\|oGs\|o5mCs\|oAs\|o5mC] |
| 2266 | [o5mCs\|oAs\|oAp\|o5mCp\|oAs\|dGs\|dTs\|dTs\|dGs\|5mCs\|dTs\|dAs\|dGs\|dGs\|dTs\|dGp\|dAp\|oTs\|oGs\|o5mCs\|oAs\|o5mC] |
| 2267 | [oGs\|LTs\|o5mCs\|oAs\|oAs\|o5mCs\|oAs\|oGs\|dTs\|dTs\|dGs\|5mCs\|dTs\|dAs\|dGs\|dGs\|dTs\|dGs\|oAs\|oT] |
| 2268 | [oGs\|oTs\|L5mCs\|oAs\|oAs\|o5mCs\|oAs\|oGs\|dTs\|dTs\|dGs\|5mCs\|dTs\|dAs\|dGs\|dGs\|dTs\|dGs\|oAs\|oT] |
| 2269 | [oGs\|oTs\|o5mCs\|LAs\|oAs\|o5mCs\|oAs\|oGs\|dTs\|dTs\|dGs\|5mCs\|dTs\|dAs\|dGs\|dGs\|dTs\|dGs\|oAs\|oT] |
| 2270 | [oGs\|oTs\|o5mCs\|oAs\|LAs\|o5mCs\|oAs\|oGs\|dTs\|dTs\|dGs\|5mCs\|dTs\|dAs\|dGs\|dGs\|dTs\|dGs\|oAs\|oT] |
| 2271 | [oGs\|oTs\|o5mCs\|oAs\|oAs\|L5mCs\|oAs\|oGs\|dTs\|dTs\|dGs\|5mCs\|dTs\|dAs\|dGs\|dGs\|dTs\|dGs\|oAs\|oT] |
| 2272 | [oGs\|oTs\|o5mCs\|oAs\|oAs\|o5mCs\|LAs\|oGs\|dTs\|dTs\|dGs\|5mCs\|dTs\|dAs\|dGs\|dGs\|dTs\|dGs\|oAs\|oT] |
| 2273 | [oGs\|oTs\|5mCs\|dAs\|dAs\|5mCs\|dAs\|dGs\|dTs\|dTs\|dGs\|5mCs\|oTs\|oAs\|oGs\|oGs\|oTs\|oGs\|LAs\|oT] |
| 2274 | [oGs\|oTs\|5mCs\|dAs\|dAs\|5mCs\|dAs\|dGs\|dTs\|dTs\|dGs\|5mCs\|oTs\|oAs\|oGs\|oGs\|oTsILGs\|oAs\|oT] |
| 2275 | [oGs\|oTs\|5mCs\|dAs\|dAs\|5mCs\|dAs\|dGs\|dTs\|dTs\|dGs\|5mCs\|oTs\|oAs\|oGs\|oGs\|LTs\|oGs\|oAs\|oT] |
| 2276 | [oGs\|oTs\|5mCs\|dAs\|dAs\|5mCs\|dAs\|dGs\|dTs\|dTs\|dGs\|5mCs\|oTs\|oAs\|oGs\|LGs\|oTs\|oGs\|oAs\|oT] |
| 2277 | [oGs\|oTs\|5mCs\|dAs\|dAs\|5mCs\|dAs\|dGs\|dTs\|dTs\|dGs\|5mCs\|oTs\|oAs\|LGs\|oGs\|oTs\|oGs\|oAs\|oT] |
| 2278 | [oGs\|oTs\|5mCs\|dAs\|dAs\|5mCs\|dAs\|dGs\|dTs\|dTs\|dGs\|5mCs\|oTs\|LAs\|oGs\|oGs\|oTs\|oGs\|oAs\|oT] |
| 2279 | [oGs\|LTs\|o5mCs\|oAs\|oAs\|o5mCs\|oAs\|dGs\|dTs\|dTs\|dGs\|5mCs\|dTs\|dAs\|dGs\|dGs\|dTs\|oGs\|oAs\|oT] |
| 2280 | [oGs\|oTs\|L5mCs\|oAs\|oAs\|o5mCs\|oAs\|dGs\|dTs\|dTs\|dGs\|5mCs\|dTs\|dAs\|dGs\|dGs\|dTs\|oGs\|oAs\|oT] |
| 2281 | [oGs\|oTs\|o5mCs\|LAs\|oAs\|o5mCs\|oAs\|dGs\|dTs\|dTs\|dGs\|5mCs\|dTs\|dAs\|dGs\|dGs\|dTs\|oGs\|oAs\|oT] |
| 2282 | [oGs\|oTs\|o5mCs\|oAs\|LAs\|o5mCs\|oAs\|dGs\|dTs\|dTs\|dGs\|5mCs\|dTs\|dAs\|dGs\|dGs\|dTs\|oGs\|oAs\|oT] |
| 2283 | [oGs\|oTs\|o5mCs\|oAs\|oAs\|L5mCs\|oAs\|dGs\|dTs\|dTs\|dGs\|5mCs\|dTs\|dAs\|dGs\|dGs\|dTs\|oGs\|oAs\|oT] |
| 2284 | [oGs\|oTs\|o5mCs\|dAs\|dAs\|5mCs\|dAs\|dGs\|dTs\|dTs\|dGs\|5mCs\|dTs\|oAs\|oGs\|oGs\|oTs\|oGs\|LAs\|oT] |
| 2285 | [oGs\|oTs\|o5mCs\|dAs\|dAs\|5mCs\|dAs\|dGs\|dTs\|dTs\|dGs\|5mCs\|dTs\|oAs\|oGs\|oGs\|oTsILGs\|oAs\|oT] |
| 2286 | [oGs\|oTs\|o5mCs\|dAs\|dAs\|5mCs\|dAs\|dGs\|dTs\|dTs\|dGs\|5mCs\|dTs\|oAs\|oGs\|oGs\|LTs\|oGs\|oAs\|oT] |
| 2287 | [oGs\|oTs\|o5mCs\|dAs\|dAs\|5mCs\|dAs\|dGs\|dTs\|dTs\|dGs\|5mCs\|dTs\|oAs\|oGs\|LGs\|oTs\|oGs\|oAs\|oT] |
| 2288 | [oGs\|oTs\|o5mCs\|dAs\|dAs\|5mCs\|dAs\|dGs\|dTs\|dTs\|dGs\|5mCs\|dTs\|oAs\|LGs\|oGs\|oTs\|oGs\|oAs\|oT] |
| 2289 | [oGs\|LTs\|o5mCs\|oAs\|oAs\|o5mCs\|oAs\|dGs\|dTs\|dTs\|dGs\|5mCs\|dTs\|dAs\|dGs\|dGs\|dTs\|oGs\|oA] |
| 2290 | [oGs\|oTs\|L5mCs\|oAs\|oAs\|o5mCs\|oAs\|dGs\|dTs\|dTs\|dGs\|5mCs\|dTs\|dAs\|dGs\|dGs\|dTs\|oGs\|oA] |
| 2291 | [oGs\|oTs\|o5mCs\|LAs\|oAs\|o5mCs\|oAs\|dGs\|dTs\|dTs\|dGs\|5mCs\|dTs\|dAs\|dGs\|dGs\|dTs\|oGs\|oA] |
| 2292 | [oGs\|oTs\|o5mCs\|oAs\|LAs\|o5mCs\|oAs\|dGs\|dTs\|dTs\|dGs\|5mCs\|dTs\|dAs\|dGs\|dGs\|dTs\|oGs\|oA] |
| 2293 | [oGs\|oTs\|o5mCs\|oAs\|oAs\|L5mCs\|oAs\|dGs\|dTs\|dTs\|dGs\|5mCs\|dTs\|dAs\|dGs\|dGs\|dTs\|oGs\|oA] |
| 2294 | [oTs\|o5mCs\|dAs\|dAs\|5mCs\|dAs\|dGs\|dTs\|dTs\|dGs\|5mCs\|dTs\|oAs\|oGs\|oGs\|oTs\|oGs\|LAs\|oT] |
| 2295 | [oTs\|o5mCs\|dAs\|dAs\|5mCs\|dAs\|dGs\|dTs\|dTs\|dGs\|5mCs\|dTs\|oAs\|oGs\|oGs\|oTs\|LGs\|oAs\|oT] |
| 2296 | [oTs\|o5mCs\|dAs\|dAs\|5mCs\|dAs\|dGs\|dTs\|dTs\|dGs\|5mCs\|dTs\|oAs\|oGs\|oGs\|LTs\|oGs\|oAs\|oT] |
| 2297 | [oTs\|o5mCs\|dAs\|dAs\|5mCs\|dAs\|dGs\|dTs\|dTs\|dGs\|5mCs\|dTs\|oAs\|oGs\|LGs\|oTs\|oGs\|oAs\|oT] |
| 2298 | [oTs\|o5mCs\|dAs\|dAs\|5mCs\|dAs\|dGs\|dTs\|dTs\|dGs\|5mCs\|dTs\|oAs\|LGs\|oGs\|oTs\|oGs\|oAs\|oT] |
| 2299 | [oGs\|LTs\|o5mCs\|oAs\|oAs\|o5mCs\|dAs\|dGs\|dTs\|dTs\|dGs\|5mCs\|dTs\|dAs\|dGs\|dGs\|oTs\|oGs\|oAs\|oT] |
| 2300 | [oGs\|oTs\|L5mCs\|oAs\|oAs\|o5mCs\|dAs\|dGs\|dTs\|dTs\|dGs\|5mCs\|dTs\|dAs\|dGs\|dGs\|oTs\|oGs\|oAs\|oT] |
| 2301 | [oGs\|oTs\|o5mCs\|LAs\|oAs\|o5mCs\|dAs\|dGs\|dTs\|dTs\|dGs\|5mCs\|dTs\|dAs\|dGs\|dGs\|oTs\|oGs\|oAs\|oT] |
| 2302 | [oGs\|oTs\|o5mCs\|oAs\|LAs\|o5mCs\|dAs\|dGs\|dTs\|dTs\|dGs\|5mCs\|dTs\|dAs\|dGs\|dGs\|oTs\|oGs\|oAs\|oT] |
| 2303 | [oGs\|oTs\|o5mCs\|oAs\|dAs\|5mCs\|dAs\|dGs\|dTs\|dTs\|dGs\|5mCs\|dTs\|dAs\|oGs\|oGs\|oTs\|oGs\|LAs\|oT] |
| 2304 | [oGs\|oTs\|o5mCs\|oAs\|dAs\|5mCs\|dAs\|dGs\|dTs\|dTs\|dGs\|5mCs\|dTs\|dAs\|oGs\|oGs\|oTs\|LGs\|oAs\|oT] |
| 2305 | [oGs\|oTs\|o5mCs\|oAs\|dAs\|5mCs\|dAs\|dGs\|dTs\|dTs\|dGs\|5mCs\|dTs\|dAs\|oGs\|oGs\|LTs\|oGs\|oAs\|oT] |
| 2306 | [oGs\|oTs\|o5mCs\|oAs\|dAs\|5mCs\|dAs\|dGs\|dTs\|dTs\|dGs\|5mCs\|dTs\|dAs\|oGs\|LGs\|oTs\|oGs\|oAs\|oT] |
| 2307 | [oGs\|LTs\|o5mCs\|oAs\|oAs\|o5mCs\|dAs\|dGs\|dTs\|dTs\|dGs\|5mCs\|dTs\|dAs\|dGs\|dGs\|oTs\|oGs\|oA] |
| 2308 | [oGs\|oTs\|L5mCs\|oAs\|oAs\|o5mCs\|dAs\|dGs\|dTs\|dTs\|dGs\|5mCs\|dTs\|dAs\|dGs\|dGs\|oTs\|oGs\|oA] |
| 2309 | [oGs\|oTs\|o5mCs\|LAs\|oAs\|o5mCs\|dAs\|dGs\|dTs\|dTs\|dGs\|5mCs\|dTs\|dAs\|dGs\|dGs\|oTs\|oGs\|oA] |
| 2310 | [oGs\|oTs\|o5mCs\|oAs\|LAs\|o5mCs\|dAs\|dGs\|dTs\|dTs\|dGs\|5mCs\|dTs\|dAs\|dGs\|dGs\|oTs\|oGs\|oA] |
| 2311 | [oGs\|oTs\|o5mCs\|dAs\|dAs\|5mCs\|dAs\|dGs\|dTs\|dTs\|dGs\|5mCs\|dTs\|dAs\|oGs\|oGs\|oTs\|oGs\|LAs\|oT] |
| 2312 | [oGs\|oTs\|o5mCs\|dAs\|dAs\|5mCs\|dAs\|dGs\|dTs\|dTs\|dGs\|5mCs\|dTs\|dAs\|oGs\|oGs\|oTs\|LGs\|oAs\|oT] |
| 2313 | [oGs\|oTs\|o5mCs\|dAs\|dAs\|5mCs\|dAs\|dGs\|dTs\|dTs\|dGs\|5mCs\|dTs\|dAs\|oGs\|oGs\|LTs\|oGs\|oAs\|oT] |
| 2314 | [oGs\|LTs\|o5mCs\|oAs\|oAs\|o5mCs\|dAs\|dGs\|dTs\|dTs\|dGs\|5mCs\|dTs\|dAs\|dGs\|dGs\|oTs\|oG] |
| 2315 | [oGs\|oTs\|L5mCs\|oAs\|oAs\|o5mCs\|dAs\|dGs\|dTs\|dTs\|dGs\|5mCs\|dTs\|dAs\|dGs\|dGs\|oTs\|oG] |
| 2316 | [oGs\|oTs\|o5mCs\|LAs\|oAs\|o5mCs\|dAs\|dGs\|dTs\|dTs\|dGs\|5mCs\|dTs\|dAs\|dGs\|dGs\|oTs\|oG] |
| 2317 | [oGs\|oTs\|o5mCs\|oAs\|LAs\|o5mCs\|dAs\|dGs\|dTs\|dTs\|dGs\|5mCs\|dTs\|dAs\|dGs\|dGs\|oTs\|oG] |
| 2318 | [o5mCs\|oAs\|dAs\|5mCs\|dAs\|dGs\|dTs\|dTs\|dGs\|5mCs\|dTs\|dAs\|oGs\|oGs\|oTs\|oGs\|LAs\|oT] |
| 2319 | [o5mCs\|oAs\|dAs\|5mCs\|dAs\|dGs\|dTs\|dTs\|dGs\|5mCs\|dTs\|dAs\|oGs\|oGs\|oTs\|LGs\|oAs\|oT] |
| 2320 | [o5mCs\|oAs\|dAs\|5mCs\|dAs\|dGs\|dTs\|dTs\|dGs\|5mCs\|dTs\|dAs\|oGs\|oGs\|LTs\|oGs\|oAs\|oT] |
| 2321 | [o5mCs\|oAs\|dAs\|5mCs\|dAs\|dGs\|dTs\|dTs\|dGs\|5mCs\|dTs\|dAs\|oGs\|LGs\|oTs\|oGs\|oAs\|oT] |
| 2322 | [oGs\|LTs\|o5mCs\|oAs\|oAs\|5mCs\|dAs\|dGs\|dTs\|dTs\|dGs\|5mCs\|dTs\|dAs\|dGs\|oGs\|oTs\|oGs\|oAs\|oT] |
| 2323 | [oGs\|oTs\|L5mCs\|oAs\|oAs\|5mCs\|dAs\|dGs\|dTs\|dTs\|dGs\|5mCs\|dTs\|dAs\|dGs\|oGs\|oTs\|oGs\|oAs\|oT] |
| 2324 | [oGs\|oTs\|o5mCs\|LAs\|oAs\|5mCs\|dAs\|dGs\|dTs\|dTs\|dGs\|5mCs\|dTs\|dAs\|dGs\|oGs\|oTs\|oGs\|oAs\|oT] |
| 2325 | [oGs\|oTs\|o5mCs\|oAs\|oAs\|5mCs\|dAs\|dGs\|dTs\|dTs\|dGs\|5mCs\|dTs\|dAs\|dGs\|oGs\|oTs\|oGs\|LAs\|oT] |
| 2326 | [oGs\|oTs\|o5mCs\|oAs\|oAs\|5mCs\|dAs\|dGs\|dTs\|dTs\|dGs\|5mCs\|dTs\|dAs\|dGs\|oGs\|oTs\|LGs\|oAs\|oT] |
| 2327 | [oGs\|oTs\|o5mCs\|oAs\|oAs\|5mCs\|dAs\|dGs\|dTs\|dTs\|dGs\|5mCs\|dTs\|dAs\|dGs\|oGs\|LTs\|oGs\|oAs\|oT] |
| 2328 | [oGs\|LTs\|o5mCs\|oAs\|oAs\|5mCs\|dAs\|dGs\|dTs\|dTs\|dGs\|5mCs\|dTs\|dAs\|dGs\|oGs\|oTs\|oGs\|oA] |
| 2329 | [oGs\|oTs\|L5mCs\|oAs\|oAs\|5mCs\|dAs\|dGs\|dTs\|dTs\|dGs\|5mCs\|dTs\|dAs\|dGs\|oGs\|oTs\|oGs\|oA] |
| 2330 | [oGs\|oTs\|o5mCs\|LAs\|oAs\|5mCs\|dAs\|dGs\|dTs\|dTs\|dGs\|5mCs\|dTs\|dAs\|dGs\|oGs\|oTs\|oGs\|oA] |
| 2331 | [oTs\|o5mCs\|oAs\|oAs\|5mCs\|dAs\|dGs\|dTs\|dTs\|dGs\|5mCs\|dTs\|dAs\|dGs\|oGs\|oTs\|oGs\|LAs\|oT] |
| 2332 | [oTs\|o5mCs\|oAs\|oAs\|5mCs\|dAs\|dGs\|dTs\|dTs\|dGs\|5mCs\|dTs\|dAs\|dGs\|oGs\|oTs\|LGs\|oAs\|oT] |
| 2333 | [oTs\|o5mCs\|oAs\|oAs\|5mCs\|dAs\|dGs\|dTs\|dTs\|dGs\|5mCs\|dTs\|dAs\|dGs\|oGs\|LTs\|oGs\|oAs\|oT] |
| 2334 | [oGs\|LTs\|o5mCs\|oAs\|oAs\|5mCs\|dAs\|dGs\|dTs\|dTs\|dGs\|5mCs\|dTs\|dAs\|dGs\|oGs\|oTs\|oG] |
| 2335 | [oGs\|oTs\|L5mCs\|oAs\|oAs\|5mCs\|dAs\|dGs\|dTs\|dTs\|dGs\|5mCs\|dTs\|dAs\|dGs\|oGs\|oTs\|oG] |
| 2336 | [oGs\|oTs\|o5mCs\|LAs\|oAs\|5mCs\|dAs\|dGs\|dTs\|dTs\|dGs\|5mCs\|dTs\|dAs\|dGs\|oGs\|oTs\|oG] |
| 2337 | [o5mCs\|oAs\|oAs\|5mCs\|dAs\|dGs\|dTs\|dTs\|dGs\|5mCs\|dTs\|dAs\|dGs\|oGs\|oTs\|oGs\|LAs\|oT] |
| 2338 | [o5mCs\|oAs\|oAs\|5mCs\|dAs\|dGs\|dTs\|dTs\|dGs\|5mCs\|dTs\|dAs\|dGs\|oGs\|oTs\|LGs\|oAs\|oT] |
| 2339 | [o5mCs\|oAs\|oAs\|5mCs\|dAs\|dGs\|dTs\|dTs\|dGs\|5mCs\|dTs\|dAs\|dGs\|oGs\|LTs\|oGs\|oAs\|oT] |
| 2340 | [oGs\|LTs\|o5mCs\|oAs\|oAs\|5mCs\|dAs\|dGs\|dTs\|dTs\|dGs\|5mCs\|dTs\|dAs\|dGs\|oGs\|oT] |
| 2341 | [oGs\|oTs\|L5mCs\|oAs\|oAs\|5mCs\|dAs\|dGs\|dTs\|dTs\|dGs\|5mCs\|dTs\|dAs\|dGs\|oGs\|oT] |
| 2342 | [oGs\|oTs\|o5mCs\|LAs\|oAs\|5mCs\|dAs\|dGs\|dTs\|dTs\|dGs\|5mCs\|dTs\|dAs\|dGs\|oGs\|oT] |
| 2343 | [oAs\|oAs\|5mCs\|dAs\|dGs\|dTs\|dTs\|dGs\|5mCs\|dTs\|dAs\|dGs\|oGs\|oTs\|oGs\|LAs\|oT] |
| 2344 | [oAs\|oAs\|5mCs\|dAs\|dGs\|dTs\|dTs\|dGs\|5mCs\|dTs\|dAs\|dGs\|oGs\|oTs\|LGs\|oAs\|oT] |
| 2345 | [oAs\|oAs\|5mCs\|dAs\|dGs\|dTs\|dTs\|dGs\|5mCs\|dTs\|dAs\|dGs\|oGs\|LTs\|oGs\|oAs\|oT] |
| 2346 | [oTs\|L5mCs\|oAs\|oAs\|5mCs\|dAs\|dGs\|dTs\|dTs\|dGs\|5mCs\|dTs\|dAs\|dGs\|oGs\|oTs\|oGs\|oAs\|oT] |
| 2347 | [oTs\|o5mCs\|LAs\|oAs\|5mCs\|dAs\|dGs\|dTs\|dTs\|dGs\|5mCs\|dTs\|dAs\|dGs\|oGs\|oTs\|oGs\|oAs\|oT] |
| 2348 | [oGs\|oTs\|o5mCs\|oAs\|oAs\|5mCs\|dAs\|dGs\|dTs\|dTs\|dGs\|5mCs\|dTs\|dAs\|dGs\|oGs\|oTs\|LGs\|oA] |
| 2349 | [oGs\|oTs\|o5mCs\|oAs\|oAs\|5mCs\|dAs\|dGs\|dTs\|dTs\|dGs\|5mCs\|dTs\|dAs\|dGs\|oGs\|LTs\|oGs\|oA] |
| 2350 | [oTs\|L5mCs\|oAs\|oAs\|5mCs\|dAs\|dGs\|dTs\|dTs\|dGs\|5mCs\|dTs\|dAs\|dGs\|oGs\|oTs\|oGs\|oA] |
| 2351 | [oTs\|o5mCs\|LAs\|oAs\|5mCs\|dAs\|dGs\|dTs\|dTs\|dGs\|5mCs\|dTs\|dAs\|dGs\|oGs\|oTs\|oGs\|oA] |
| 2352 | [oTs\|o5mCs\|oAs\|oAs\|5mCs\|dAs\|dGs\|dTs\|dTs\|dGs\|5mCs\|dTs\|dAs\|dGs\|oGs\|oTs\|LGs\|oA] |
| 2353 | [oTs\|o5mCs\|oAs\|oAs\|5mCs\|dAs\|dGs\|dTs\|dTs\|dGs\|5mCs\|dTs\|dAs\|dGs\|oGs\|LTs\|oGs\|oA] |
| 2354 | [oTs\|L5mCs\|oAs\|oAs\|5mCs\|dAs\|dGs\|dTs\|dTs\|dGs\|5mCs\|dTs\|dAs\|dGs\|oGs\|oTs\|oG] |
| 2355 | [oTs\|o5mCs\|LAs\|oAs\|5mCs\|dAs\|dGs\|dTs\|dTs\|dGs\|5mCs\|dTs\|dAs\|dGs\|oGs\|oTs\|oG] |
| 2356 | [oTs\|o5mCs\|oAs\|oAs\|5mCs\|dAs\|dGs\|dTs\|dTs\|dGs\|5mCs\|dTs\|dAs\|dGs\|oGs\|LTs\|oG] |
| 2357 | [oGs\|oTs\|o5mCs\|oAs\|oAs\|o5mCs\|oAs\|oGs\|dTs\|dTs\|dGs\|5mCs\|dTs\|dAs\|dGs\|dGs\|dTs\|dGs\|oAs\|oT] |
| 2358 | [oGs\|oTs\|5mCs\|dAs\|dAs\|5mCs\|dAs\|dGs\|dTs\|dTs\|dGs\|5mCs\|oTs\|oAs\|oGs\|oGs\|oTs\|oGs\|oAs\|oT] |
| 2359 | [oGs\|oTs\|o5mCs\|oAs\|oAs\|o5mCs\|oAs\|dGs\|dTs\|dTs\|dGs\|5mCs\|dTs\|dAs\|dGs\|dGs\|dTs\|oGs\|oAs\|oT] |
| 2360 | [oGs\|oTs\|o5mCs\|dAs\|dAs\|5mCs\|dAs\|dGs\|dTs\|dTs\|dGs\|5mCs\|dTs\|oAs\|oGs\|oGs\|oTs\|oGs\|oAs\|oT] |
| 2361 | [oGs\|oTs\|o5mCs\|oAs\|oAs\|o5mCs\|oAs\|dGs\|dTs\|dTs\|dGs\|5mCs\|dTs\|dAs\|dGs\|dGs\|dTs\|oGs\|oA] |
| 2362 | [oTs\|o5mCs\|dAs\|dAs\|5mCs\|dAs\|dGs\|dTs\|dTs\|dGs\|5mCs\|dTs\|oAs\|oGs\|oGs\|oTs\|oGs\|oAs\|oT] |
| 2363 | [oGs\|oTs\|o5mCs\|oAs\|oAs\|o5mCs\|dAs\|dGs\|dTs\|dTs\|dGs\|5mCs\|dTs\|dAs\|dGs\|dGs\|oTs\|oGs\|oAs\|oT] |
| 2364 | [oGs\|oTs\|o5mCs\|oAs\|dAs\|5mCs\|dAs\|dGs\|dTs\|dTs\|dGs\|5mCs\|dTs\|dAs\|oGs\|oGs\|oTs\|oGs\|oAs\|oT] |
| 2365 | [oGs\|oTs\|o5mCs\|oAs\|oAs\|o5mCs\|dAs\|dGs\|dTs\|dTs\|dGs\|5mCs\|dTs\|dAs\|dGs\|dGs\|oTs\|oGs\|oA] |
| 2366 | [oGs\|oTs\|o5mCs\|dAs\|dAs\|5mCs\|dAs\|dGs\|dTs\|dTs\|dGs\|5mCs\|dTs\|dAs\|oGs\|oGs\|oTs\|oGs\|oAs\|oT] |
| 2367 | [oGs\|oTs\|o5mCs\|oAs\|oAs\|o5mCs\|dAs\|dGs\|dTs\|dTs\|dGs\|5mCs\|dTs\|dAs\|dGs\|dGs\|oTs\|oG] |
| 2368 | [o5mCs\|oAs\|dAs\|5mCs\|dAs\|dGs\|dTs\|dTs\|dGs\|5mCs\|dTs\|dAs\|oGs\|oGs\|oTs\|oGs\|oAs\|oT] |
| 2369 | [oGs\|oTs\|o5mCs\|oAs\|oAs\|5mCs\|dAs\|dGs\|dTs\|dTs\|dGs\|5mCs\|dTs\|dAs\|dGs\|oGs\|oTs\|oGs\|oAs\|oT] |
| 2370 | [oGs\|oTs\|o5mCs\|oAs\|oAs\|5mCs\|dAs\|dGs\|dTs\|dTs\|dGs\|5mCs\|dTs\|dAs\|dGs\|oGs\|oTs\|oGs\|oA] |
| 2371 | [oGs\|oTs\|o5mCs\|oAs\|oAs\|5mCs\|dAs\|dGs\|dTs\|dTs\|dGs\|5mCs\|dTs\|dAs\|dGs\|oGs\|oTs\|oG] |
| 2372 | [o5mCs\|oAs\|oAs\|5mCs\|dAs\|dGs\|dTs\|dTs\|dGs\|5mCs\|dTs\|dAs\|dGs\|oGs\|oTs\|oGs\|oAs\|oT] |
| 2373 | [oGs\|oTs\|o5mCs\|oAs\|oAs\|5mCs\|dAs\|dGs\|dTs\|dTs\|dGs\|5mCs\|dTs\|dAs\|dGs\|oGs\|oT] |
| 2374 | [oAs\|oAs\|5mCs\|dAs\|dGs\|dTs\|dTs\|dGs\|5mCs\|dTs\|dAs\|dGs\|oGs\|oTs\|oGs\|oAs\|oT] |
| 2375 | [oTs\|o5mCs\|oAs\|oAs\|5mCs\|dAs\|dGs\|dTs\|dTs\|dGs\|5mCs\|dTs\|dAs\|dGs\|oGs\|oTs\|oGs\|oAs\|oT] |
| 2376 | [oTs\|o5mCs\|oAs\|oAs\|5mCs\|dAs\|dGs\|dTs\|dTs\|dGs\|5mCs\|dTs\|dAs\|dGs\|oGs\|oTs\|oGs\|oA] |
| 2377 | [oTs\|o5mCs\|oAs\|oAs\|5mCs\|dAs\|dGs\|dTs\|dTs\|dGs\|5mCs\|dTs\|dAs\|dGs\|oGs\|oTs\|oG] |
| 2378 | [oGs\|oTs\|o5mCp\|oAs\|oAs\|5mCs\|dAs\|dGs\|dTs\|dTs\|dGs\|5mCs\|dTs\|dAs\|dGs\|oGs\|oTs\|oGs\|oAs\|oT] |
| 2379 | [oGs\|oTs\|o5mCs\|oAp\|oAs\|5mCs\|dAs\|dGs\|dTs\|dTs\|dGs\|5mCs\|dTs\|dAs\|dGs\|oGs\|oTs\|oGs\|oAs\|oT] |
| 2380 | [oGs\|oTs\|o5mCp\|oAp\|oAs\|5mCs\|dAs\|dGs\|dTs\|dTs\|dGs\|5mCs\|dTs\|dAs\|dGs\|oGs\|oTs\|oGs\|oAs\|oT] |
| 2381 | [oGs\|oTs\|o5mCs\|oAs\|oAs\|5mCs\|dAs\|dGs\|dTs\|dTs\|dGs\|5mCs\|dTs\|dAs\|dGs\|oGs\|oTp\|oGs\|oAs\|oT] |
| 2382 | [oGs\|oTs\|o5mCs\|oAs\|oAs\|5mCs\|dAs\|dGs\|dTs\|dTs\|dGs\|5mCs\|dTs\|dAs\|dGs\|oGp\|oTs\|oGs\|oAs\|oT] |
| 2383 | [oGs\|oTs\|o5mCs\|oAs\|oAs\|5mCs\|dAs\|dGs\|dTs\|dTs\|dGs\|5mCs\|dTs\|dAs\|dGs\|oGp\|oTp\|oGs\|oAs\|oT] |
| 2384 | [oGs\|oTs\|o5mCp\|oAs\|oAs\|5mCs\|dAs\|dGs\|dTs\|dTs\|dGs\|5mCs\|dTs\|dAs\|dGs\|oGs\|oTp\|oGs\|oAs\|oT] |
| 2385 | [oGs\|oTs\|o5mCp\|oAs\|oAs\|5mCs\|dAs\|dGs\|dTs\|dTs\|dGs\|5mCs\|dTs\|dAs\|dGs\|oGp\|oTs\|oGs\|oAs\|oT] |
| 2386 | [oGs\|oTs\|o5mCs\|oAp\|oAs\|5mCs\|dAs\|dGs\|dTs\|dTs\|dGs\|5mCs\|dTs\|dAs\|dGs\|oGs\|oTp\|oGs\|oAs\|oT] |
| 2387 | [oGs\|oTs\|o5mCs\|oAp\|oAs\|5mCs\|dAs\|dGs\|dTs\|dTs\|dGs\|5mCs\|dTs\|dAs\|dGs\|oGp\|oTs\|oGs\|oAs\|oT] |
| 2388 | [oGs\|oTs\|o5mCp\|oAs\|oAs\|5mCs\|dAs\|dGs\|dTs\|dTs\|dGs\|5mCs\|dTs\|dAs\|dGs\|oGp\|oTp\|oGs\|oAs\|oT] |
| 2389 | [oGs\|oTs\|o5mCs\|oAp\|oAs\|5mCs\|dAs\|dGs\|dTs\|dTs\|dGs\|5mCs\|dTs\|dAs\|dGs\|oGp\|oTp\|oGs\|oAs\|oT] |
| 2390 | [oGs\|oTs\|o5mCp\|oAp\|oAs\|5mCs\|dAs\|dGs\|dTs\|dTs\|dGs\|5mCs\|dTs\|dAs\|dGs\|oGs\|oTp\|oGs\|oAs\|oT] |
| 2391 | [oGs\|oTs\|o5mCp\|oAp\|oAs\|5mCs\|dAs\|dGs\|dTs\|dTs\|dGs\|5mCs\|dTs\|dAs\|dGs\|oGp\|oTs\|oGs\|oAs\|oT] |
| 2392 | [oGs\|oTs\|o5mCp\|oAp\|oAs\|5mCs\|dAs\|dGs\|dTs\|dTs\|dGs\|5mCs\|dTs\|dAs\|dGs\|oGp\|oTp\|oGs\|oAs\|oT] |
| 2393 | [oGs\|oTs\|o5mCs\|oAs\|oAs\|5mCs\|dAs\|dGs\|dTs\|dTs\|dGs\|5mCs\|dTs\|dAs\|dGs\|oGs\|oTs\|oGs\|oAs\|oTs\|oG] |
| 2394 | [oGs\|oTs\|o5mCp\|oAs\|oAs\|5mCs\|dAs\|dGs\|dTs\|dTs\|dGs\|5mCs\|dTs\|dAs\|dGs\|oGs\|oTs\|oGs\|oAs\|oTs\|oG] |
| 2395 | [oGs\|oTs\|o5mCs\|oAp\|oAs\|5mCs\|dAs\|dGs\|dTs\|dTs\|dGs\|5mCs\|dTs\|dAs\|dGs\|oGs\|oTs\|oGs\|oAs\|oTs\|oG] |
| 2396 | [oGs\|oTs\|o5mCp\|oAp\|oAs\|5mCs\|dAs\|dGs\|dTs\|dTs\|dGs\|5mCs\|dTs\|dAs\|dGs\|oGs\|oTs\|oGs\|oAs\|oTs\|oG] |
| 2397 | [oGs\|oTs\|o5mCs\|oAs\|oAs\|5mCs\|dAs\|dGs\|dTs\|dTs\|dGs\|5mCs\|dTs\|dAs\|dGs\|oGs\|oTp\|oGs\|oAs\|oTs\|oG] |
| 2398 | [oGs\|oTs\|o5mCs\|oAs\|oAs\|5mCs\|dAs\|dGs\|dTs\|dTs\|dGs\|5mCs\|dTs\|dAs\|dGs\|oGp\|oTs\|oGs\|oAs\|oTs\|oG] |
| 2399 | [oGs\|oTs\|o5mCs\|oAs\|oAs\|5mCs\|dAs\|dGs\|dTs\|dTs\|dGs\|5mCs\|dTs\|dAs\|dGs\|oGp\|oTp\|oGs\|oAs\|oTs\|oG] |
| 2400 | [oGs\|oTs\|o5mCp\|oAs\|oAs\|5mCs\|dAs\|dGs\|dTs\|dTs\|dGs\|5mCs\|dTs\|dAs\|dGs\|oGs\|oTp\|oGs\|oAs\|oTs\|oG] |
| 2401 | [oGs\|oTs\|o5mCp\|oAs\|oAs\|5mCs\|dAs\|dGs\|dTs\|dTs\|dGs\|5mCs\|dTs\|dAs\|dGs\|oGp\|oTs\|oGs\|oAs\|oTs\|oG] |
| 2402 | [oGs\|oTs\|o5mCs\|oAp\|oAs\|5mCs\|dAs\|dGs\|dTs\|dTs\|dGs\|5mCs\|dTs\|dAs\|dGs\|oGs\|oTp\|oGs\|oAs\|oTs\|oG] |
| 2403 | [oGs\|oTs\|o5mCs\|oAp\|oAs\|5mCs\|dAs\|dGs\|dTs\|dTs\|dGs\|5mCs\|dTs\|dAs\|dGs\|oGp\|oTs\|oGs\|oAs\|oTs\|oG] |
| 2404 | [oGs\|oTs\|o5mCp\|oAs\|oAs\|5mCs\|dAs\|dGs\|dTs\|dTs\|dGs\|5mCs\|dTs\|dAs\|dGs\|oGp\|oTp\|oGs\|oAs\|oTs\|oG] |
| 2405 | [oGs\|oTs\|o5mCs\|oAp\|oAs\|5mCs\|dAs\|dGs\|dTs\|dTs\|dGs\|5mCs\|dTs\|dAs\|dGs\|oGp\|oTp\|oGs\|oAs\|oTs\|oG] |
| 2406 | [oGs\|oTs\|o5mCp\|oAp\|oAs\|5mCs\|dAs\|dGs\|dTs\|dTs\|dGs\|5mCs\|dTs\|dAs\|dGs\|oGs\|oTp\|oGs\|oAs\|oTs\|oG] |
| 2407 | [oGs\|oTs\|o5mCp\|oAp\|oAs\|5mCs\|dAs\|dGs\|dTs\|dTs\|dGs\|5mCs\|dTs\|dAs\|dGs\|oGp\|oTs\|oGs\|oAs\|oTs\|oG] |
| 2408 | [oGs\|oTs\|o5mCp\|oAp\|oAs\|5mCs\|dAs\|dGs\|dTs\|dTs\|dGs\|5mCs\|dTs\|dAs\|dGs\|oGp\|oTp\|oGs\|oAs\|oTs\|oG] |
| 2409 | [oGs\|oTs\|o5mCs\|oAs\|oAs\|5mCs\|dAs\|dGs\|dTs\|dTs\|dGs\|5mCs\|dTs\|dAs\|dGs\|oGs\|oTs\|oGs\|oAs\|oTs\|oGs\|o5mC] |
| 2410 | [oGs\|oTs\|o5mCp\|oAs\|oAs\|5mCs\|dAs\|dGs\|dTs\|dTs\|dGs\|5mCs\|dTs\|dAs\|dGs\|oGs\|oTs\|oGs\|oAs\|oTs\|oGs\|o5mC] |
| 2411 | [oGs\|oTs\|o5mCs\|oAp\|oAs\|5mCs\|dAs\|dGs\|dTs\|dTs\|dGs\|5mCs\|dTs\|dAs\|dGs\|oGs\|oTs\|oGs\|oAs\|oTs\|oGs\|o5mC] |
| 2412 | [oGs\|oTs\|o5mCp\|oAp\|oAs\|5mCs\|dAs\|dGs\|dTs\|dTs\|dGs\|5mCs\|dTs\|dAs\|dGs\|oGs\|oTs\|oGs\|oAs\|oTs\|oGs\|o5mC] |
| 2413 | [oGs\|oTs\|o5mCs\|oAs\|oAs\|5mCs\|dAs\|dGs\|dTs\|dTs\|dGs\|5mCs\|dTs\|dAs\|dGs\|oGs\|oTp\|oGs\|oAs\|oTs\|oGs\|o5mC] |
| 2414 | [oGs\|oTs\|o5mCs\|oAs\|oAs\|5mCs\|dAs\|dGs\|dTs\|dTs\|dGs\|5mCs\|dTs\|dAs\|dGs\|oGp\|oTs\|oGs\|oAs\|oTs\|oGs\|o5mC] |
| 2415 | [oGs\|oTs\|o5mCs\|oAs\|oAs\|5mCs\|dAs\|dGs\|dTs\|dTs\|dGs\|5mCs\|dTs\|dAs\|dGs\|oGp\|oTp\|oGs\|oAs\|oTs\|oGs\|o5mC] |
| 2416 | [oGs\|oTs\|o5mCp\|oAs\|oAs\|5mCs\|dAs\|dGs\|dTs\|dTs\|dGs\|5mCs\|dTs\|dAs\|dGs\|oGs\|oTp\|oGs\|oAs\|oTs\|oGs\|o5mC] |
| 2417 | [oGs\|oTs\|o5mCp\|oAs\|oAs\|5mCs\|dAs\|dGs\|dTs\|dTs\|dGs\|5mCs\|dTs\|dAs\|dGs\|oGp\|oTs\|oGs\|oAs\|oTs\|oGs\|o5mC] |
| 2418 | [oGs\|oTs\|o5mCs\|oAp\|oAs\|5mCs\|dAs\|dGs\|dTs\|dTs\|dGs\|5mCs\|dTs\|dAs\|dGs\|oGs\|oTp\|oGs\|oAs\|oTs\|oGs\|o5mC] |
| 2419 | [oGs\|oTs\|o5mCs\|oAp\|oAs\|5mCs\|dAs\|dGs\|dTs\|dTs\|dGs\|5mCs\|dTs\|dAs\|dGs\|oGp\|oTs\|oGs\|oAs\|oTs\|oGs\|o5mC] |
| 2420 | [oGs\|oTs\|o5mCp\|oAs\|oAs\|5mCs\|dAs\|dGs\|dTs\|dTs\|dGs\|5mCs\|dTs\|dAs\|dGs\|oGp\|oTp\|oGs\|oAs\|oTs\|oGs\|o5mC] |
| 2421 | [oGs\|oTs\|o5mCs\|oAp\|oAs\|5mCs\|dAs\|dGs\|dTs\|dTs\|dGs\|5mCs\|dTs\|dAs\|dGs\|oGp\|oTp\|oGs\|oAs\|oTs\|oGs\|o5mC] |
| 2422 | [oGs\|oTs\|o5mCp\|oAp\|oAs\|5mCs\|dAs\|dGs\|dTs\|dTs\|dGs\|5mCs\|dTs\|dAs\|dGs\|oGs\|oTp\|oGs\|oAs\|oTs\|oGs\|o5mC] |
| 2423 | [oGs\|oTs\|o5mCp\|oAp\|oAs\|5mCs\|dAs\|dGs\|dTs\|dTs\|dGs\|5mCs\|dTs\|dAs\|dGs\|oGp\|oTs\|oGs\|oAs\|oTs\|oGs\|o5mC] |
| 2424 | [oGs\|oTs\|o5mCp\|oAp\|oAs\|5mCs\|dAs\|dGs\|dTs\|dTs\|dGs\|5mCs\|dTs\|dAs\|dGs\|oGp\|oTp\|oGs\|oAs\|oTs\|oGs\|o5mC] |
| 2425 | [oGs\|oTs\|o5mCs\|oAs\|oAs\|5mCs\|dAs\|dGs\|dTs\|dTs\|dGs\|5mCs\|dTs\|dAs\|dGs\|oGs\|oTs\|oGs\|oAs\|oTs\|oGs\|o5mCs\|oA] |
| 2426 | [oGs\|oTs\|o5mCp\|oAs\|oAs\|5mCs\|dAs\|dGs\|dTs\|dTs\|dGs\|5mCs\|dTs\|dAs\|dGs\|oGs\|oTs\|oGs\|oAs\|oTs\|oGs\|o5mCs\|oA] |
| 2427 | [oGs\|oTs\|o5mCs\|oAp\|oAs\|5mCs\|dAs\|dGs\|dTs\|dTs\|dGs\|5mCs\|dTs\|dAs\|dGs\|oGs\|oTs\|oGs\|oAs\|oTs\|oGs\|o5mCs\|oA] |
| 2428 | [oGs\|oTs\|o5mCp\|oAp\|oAs\|5mCs\|dAs\|dGs\|dTs\|dTs\|dGs\|5mCs\|dTs\|dAs\|dGs\|oGs\|oTs\|oGs\|oAs\|oTs\|oGs\|o5mCs\|oA] |
| 2429 | [oGs\|oTs\|o5mCs\|oAs\|oAs\|5mCs\|dAs\|dGs\|dTs\|dTs\|dGs\|5mCs\|dTs\|dAs\|dGs\|oGs\|oTp\|oGs\|oAs\|oTs\|oGs\|o5mCs\|oA] |
| 2430 | [oGs\|oTs\|o5mCs\|oAs\|oAs\|5mCs\|dAs\|dGs\|dTs\|dTs\|dGs\|5mCs\|dTs\|dAs\|dGs\|oGp\|oTs\|oGs\|oAs\|oTs\|oGs\|o5mCs\|oA] |
| 2431 | [oGs\|oTs\|o5mCs\|oAs\|oAs\|5mCs\|dAs\|dGs\|dTs\|dTs\|dGs\|5mCs\|dTs\|dAs\|dGs\|oGp\|oTp\|oGs\|oAs\|oTs\|oGs\|o5mCs\|oA] |
| 2432 | [oGs\|oTs\|o5mCp\|oAs\|oAs\|5mCs\|dAs\|dGs\|dTs\|dTs\|dGs\|5mCs\|dTs\|dAs\|dGs\|oGs\|oTp\|oGs\|oAs\|oTs\|oGs\|o5mCs\|oA] |
| 2433 | [oGs\|oTs\|o5mCp\|oAs\|oAs\|5mCs\|dAs\|dGs\|dTs\|dTs\|dGs\|5mCs\|dTs\|dAs\|dGs\|oGp\|oTs\|oGs\|oAs\|oTs\|oGs\|o5mCs\|oA] |
| 2434 | [oGs\|oTs\|o5mCs\|oAp\|oAs\|5mCs\|dAs\|dGs\|dTs\|dTs\|dGs\|5mCs\|dTs\|dAs\|dGs\|oGs\|oTp\|oGs\|oAs\|oTs\|oGs\|o5mCs\|oA] |
| 2435 | [oGs\|oTs\|o5mCs\|oAp\|oAs\|5mCs\|dAs\|dGs\|dTs\|dTs\|dGs\|5mCs\|dTs\|dAs\|dGs\|oGp\|oTs\|oGs\|oAs\|oTs\|oGs\|o5mCs\|oA] |
| 2436 | [oGs\|oTs\|o5mCp\|oAs\|oAs\|5mCs\|dAs\|dGs\|dTs\|dTs\|dGs\|5mCs\|dTs\|dAs\|dGs\|oGp\|oTp\|oGs\|oAs\|oTs\|oGs\|o5mCs\|oA] |
| 2437 | [oGs\|oTs\|o5mCs\|oAp\|oAs\|5mCs\|dAs\|dGs\|dTs\|dTs\|dGs\|5mCs\|dTs\|dAs\|dGs\|oGp\|oTp\|oGs\|oAs\|oTs\|oGs\|o5mCs\|oA] |
| 2438 | [oGs\|oTs\|o5mCp\|oAp\|oAs\|5mCs\|dAs\|dGs\|dTs\|dTs\|dGs\|5mCs\|dTs\|dAs\|dGs\|oGs\|oTp\|oGs\|oAs\|oTs\|oGs\|o5mCs\|oA] |
| 2439 | [oGs\|oTs\|o5mCp\|oAp\|oAs\|5mCs\|dAs\|dGs\|dTs\|dTs\|dGs\|5mCs\|dTs\|dAs\|dGs\|oGp\|oTs\|oGs\|oAs\|oTs\|oGs\|o5mCs\|oA] |
| 2440 | [oGs\|oTs\|o5mCp\|oAp\|oAs\|5mCs\|dAs\|dGs\|dTs\|dTs\|dGs\|5mCs\|dTs\|dAs\|dGs\|oGp\|oTp\|oGs\|oAs\|oTs\|oGs\|o5mCs\|oA] |
| 2441 | [oGs\|oTs\|o5mCs\|oAs\|oAs\|5mCs\|dAs\|dGs\|dTs\|dTs\|dGs\|5mCs\|dTs\|dAs\|dGs\|dGs\|oTs\|oGs\|oAs\|oTs\|oG] |
| 2442 | [oGs\|oTs\|o5mCp\|oAs\|oAs\|5mCs\|dAs\|dGs\|dTs\|dTs\|dGs\|5mCs\|dTs\|dAs\|dGs\|dGs\|oTs\|oGs\|oAs\|oTs\|oG] |
| 2443 | [oGs\|oTs\|o5mCs\|oAp\|oAs\|5mCs\|dAs\|dGs\|dTs\|dTs\|dGs\|5mCs\|dTs\|dAs\|dGs\|dGs\|oTs\|oGs\|oAs\|oTs\|oG] |
| 2444 | [oGs\|oTs\|o5mCp\|oAp\|oAs\|5mCs\|dAs\|dGs\|dTs\|dTs\|dGs\|5mCs\|dTs\|dAs\|dGs\|dGs\|oTs\|oGs\|oAs\|oTs\|oG] |
| 2445 | [oGs\|oTs\|o5mCs\|oAs\|oAs\|5mCs\|dAs\|dGs\|dTs\|dTs\|dGs\|5mCs\|dTs\|dAs\|dGs\|dGs\|oTp\|oGs\|oAs\|oTs\|oG] |
| 2446 | [oGs\|oTs\|o5mCs\|oAs\|oAs\|5mCs\|dAs\|dGs\|dTs\|dTs\|dGs\|5mCs\|dTs\|dAs\|dGs\|dGp\|oTs\|oGs\|oAs\|oTs\|oG] |
| 2447 | [oGs\|oTs\|o5mCs\|oAs\|oAs\|5mCs\|dAs\|dGs\|dTs\|dTs\|dGs\|5mCs\|dTs\|dAs\|dGs\|dGp\|oTp\|oGs\|oAs\|oTs\|oG] |
| 2448 | [oGs\|oTs\|o5mCp\|oAs\|oAs\|5mCs\|dAs\|dGs\|dTs\|dTs\|dGs\|5mCs\|dTs\|dAs\|dGs\|dGs\|oTp\|oGs\|oAs\|oTs\|oG] |
| 2449 | [oGs\|oTs\|o5mCp\|oAs\|oAs\|5mCs\|dAs\|dGs\|dTs\|dTs\|dGs\|5mCs\|dTs\|dAs\|dGs\|dGp\|oTs\|oGs\|oAs\|oTs\|oG] |
| 2450 | [oGs\|oTs\|o5mCs\|oAp\|oAs\|5mCs\|dAs\|dGs\|dTs\|dTs\|dGs\|5mCs\|dTs\|dAs\|dGs\|dGs\|oTp\|oGs\|oAs\|oTs\|oG] |
| 2451 | [oGs\|oTs\|o5mCs\|oAp\|oAs\|5mCs\|dAs\|dGs\|dTs\|dTs\|dGs\|5mCs\|dTs\|dAs\|dGs\|dGp\|oTs\|oGs\|oAs\|oTs\|oG] |
| 2452 | [oGs\|oTs\|o5mCp\|oAs\|oAs\|5mCs\|dAs\|dGs\|dTs\|dTs\|dGs\|5mCs\|dTs\|dAs\|dGs\|dGp\|oTp\|oGs\|oAs\|oTs\|oG] |
| 2453 | [oGs\|oTs\|o5mCs\|oAp\|oAs\|5mCs\|dAs\|dGs\|dTs\|dTs\|dGs\|5mCs\|dTs\|dAs\|dGs\|dGp\|oTp\|oGs\|oAs\|oTs\|oG] |
| 2454 | [oGs\|oTs\|o5mCp\|oAp\|oAs\|5mCs\|dAs\|dGs\|dTs\|dTs\|dGs\|5mCs\|dTs\|dAs\|dGs\|dGs\|oTp\|oGs\|oAs\|oTs\|oG] |
| 2455 | [oGs\|oTs\|o5mCp\|oAp\|oAs\|5mCs\|dAs\|dGs\|dTs\|dTs\|dGs\|5mCs\|dTs\|dAs\|dGs\|dGp\|oTs\|oGs\|oAs\|oTs\|oG] |
| 2456 | [oGs\|oTs\|o5mCp\|oAp\|oAs\|5mCs\|dAs\|dGs\|dTs\|dTs\|dGs\|5mCs\|dTs\|dAs\|dGs\|dGp\|oTp\|oGs\|oAs\|oTs\|oG] |
| 2457 | [oGs\|oTs\|o5mCs\|oAs\|oAs\|5mCs\|dAs\|dGs\|dTs\|dTs\|dGs\|5mCs\|dTs\|dAs\|dGs\|dGs\|dTs\|oGs\|oAs\|oTs\|oGs\|o5mC] |
| 2458 | [oGs\|oTs\|o5mCp\|oAs\|oAs\|5mCs\|dAs\|dGs\|dTs\|dTs\|dGs\|5mCs\|dTs\|dAs\|dGs\|dGs\|dTs\|oGs\|oAs\|oTs\|oGs\|o5mC] |
| 2459 | [oGs\|oTs\|o5mCs\|oAp\|oAs\|5mCs\|dAs\|dGs\|dTs\|dTs\|dGs\|5mCs\|dTs\|dAs\|dGs\|dGs\|dTs\|oGs\|oAs\|oTs\|oGs\|o5mC] |
| 2460 | [oGs\|oTs\|o5mCp\|oAp\|oAs\|5mCs\|dAs\|dGs\|dTs\|dTs\|dGs\|5mCs\|dTs\|dAs\|dGs\|dGs\|dTs\|oGs\|oAs\|oTs\|oGs\|o5mC] |
| 2461 | [oGs\|oTs\|o5mCs\|oAs\|oAs\|5mCs\|dAs\|dGs\|dTs\|dTs\|dGs\|5mCs\|dTs\|dAs\|dGs\|dGs\|dTp\|oGs\|oAs\|oTs\|oGs\|o5mC] |
| 2462 | [oGs\|oTs\|o5mCs\|oAs\|oAs\|5mCs\|dAs\|dGs\|dTs\|dTs\|dGs\|5mCs\|dTs\|dAs\|dGs\|dGp\|dTs\|oGs\|oAs\|oTs\|oGs\|o5mC] |
| 2463 | [oGs\|oTs\|o5mCs\|oAs\|oAs\|5mCs\|dAs\|dGs\|dTs\|dTs\|dGs\|5mCs\|dTs\|dAs\|dGs\|dGp\|dTp\|oGs\|oAs\|oTs\|oGs\|o5mC] |
| 2464 | [oGs\|oTs\|o5mCp\|oAs\|oAs\|5mCs\|dAs\|dGs\|dTs\|dTs\|dGs\|5mCs\|dTs\|dAs\|dGs\|dGs\|dTp\|oGs\|oAs\|oTs\|oGs\|o5mC] |
| 2465 | [oGs\|oTs\|o5mCp\|oAs\|oAs\|5mCs\|dAs\|dGs\|dTs\|dTs\|dGs\|5mCs\|dTs\|dAs\|dGs\|dGp\|dTs\|oGs\|oAs\|oTs\|oGs\|o5mC] |
| 2466 | [oGs\|oTs\|o5mCs\|oAp\|oAs\|5mCs\|dAs\|dGs\|dTs\|dTs\|dGs\|5mCs\|dTs\|dAs\|dGs\|dGs\|dTp\|oGs\|oAs\|oTs\|oGs\|o5mC] |
| 2467 | [oGs\|oTs\|o5mCs\|oAp\|oAs\|5mCs\|dAs\|dGs\|dTs\|dTs\|dGs\|5mCs\|dTs\|dAs\|dGs\|dGp\|dTs\|oGs\|oAs\|oTs\|oGs\|o5mC] |
| 2468 | [oGs\|oTs\|o5mCp\|oAs\|oAs\|5mCs\|dAs\|dGs\|dTs\|dTs\|dGs\|5mCs\|dTs\|dAs\|dGs\|dGp\|dTp\|oGs\|oAs\|oTs\|oGs\|o5mC] |
| 2469 | [oGs\|oTs\|o5mCs\|oAp\|oAs\|5mCs\|dAs\|dGs\|dTs\|dTs\|dGs\|5mCs\|dTs\|dAs\|dGs\|dGp\|dTp\|oGs\|oAs\|oTs\|oGs\|o5mC] |
| 2470 | [oGs\|oTs\|o5mCp\|oAp\|oAs\|5mCs\|dAs\|dGs\|dTs\|dTs\|dGs\|5mCs\|dTs\|dAs\|dGs\|dGs\|dTp\|oGs\|oAs\|oTs\|oGs\|o5mC] |
| 2471 | [oGs\|oTs\|o5mCp\|oAp\|oAs\|5mCs\|dAs\|dGs\|dTs\|dTs\|dGs\|5mCs\|dTs\|dAs\|dGs\|dGp\|dTs\|oGs\|oAs\|oTs\|oGs\|o5mC] |
| 2472 | [oGs\|oTs\|o5mCp\|oAp\|oAs\|5mCs\|dAs\|dGs\|dTs\|dTs\|dGs\|5mCs\|dTs\|dAs\|dGs\|dGp\|dTp\|oGs\|oAs\|oTs\|oGs\|o5mC] |
| 2473 | [oTs\|LTs\|o5mCs\|oTs\|oTs\|o5mCs\|oTs\|oTs\|dGs\|dTs\|dAs\|5mCs\|dAs\|dGs\|dTs\|dTs\|dGs\|dGs\|oTs\|o5mC] |
| 2474 | [oTs\|oTs\|L5mCs\|oTs\|oTs\|o5mCs\|oTs\|oTs\|dGs\|dTs\|dAs\|5mCs\|dAs\|dGs\|dTs\|dTs\|dGs\|dGs\|oTs\|o5mC] |
| 2475 | [oTs\|oTs\|o5mCs\|LTs\|oTs\|o5mCs\|oTs\|oTs\|dGs\|dTs\|dAs\|5mCs\|dAs\|dGs\|dTs\|dTs\|dGs\|dGs\|oTs\|o5mC] |
| 2476 | [oTs\|oTs\|o5mCs\|oTs\|LTs\|o5mCs\|oTs\|oTs\|dGs\|dTs\|dAs\|5mCs\|dAs\|dGs\|dTs\|dTs\|dGs\|dGs\|oTs\|o5mC] |
| 2477 | [oTs\|oTs\|o5mCs\|oTs\|oTs\|L5mCs\|oTs\|oTs\|dGs\|dTs\|dAs\|5mCs\|dAs\|dGs\|dTs\|dTs\|dGs\|dGs\|oTs\|o5mC] |
| 2478 | [oTs\|oTs\|o5mCs\|oTs\|oTs\|o5mCs\|LTs\|oTs\|dGs\|dTs\|dAs\|5mCs\|dAs\|dGs\|dTs\|dTs\|dGs\|dGs\|oTs\|o5mC] |
| 2479 | [oTs\|oTs\|5mCs\|dTs\|dTs\|5mCs\|dTs\|dTs\|dGs\|dTs\|dAs\|5mCs\|oAs\|oGs\|oTs\|oTs\|oGs\|oGs\|LTs\|o5mC] |
| 2480 | [oTs\|oTs\|5mCs\|dTs\|dTs\|5mCs\|dTs\|dTs\|dGs\|dTs\|dAs\|5mCs\|oAs\|oGs\|oTs\|oTs\|oGs\|LGs\|oTs\|o5mC] |
| 2481 | [oTs\|oTs\|5mCs\|dTs\|dTs\|5mCs\|dTs\|dTs\|dGs\|dTs\|dAs\|5mCs\|oAs\|oGs\|oTs\|oTs\|LGs\|oGs\|oTs\|o5mC] |
| 2482 | [oTs\|oTs\|5mCs\|dTs\|dTs\|5mCs\|dTs\|dTs\|dGs\|dTs\|dAs\|5mCs\|oAs\|oGs\|oTs\|LTs\|oGs\|oGs\|oTs\|o5mC] |
| 2483 | [oTs\|oTs\|5mCs\|dTs\|dTs\|5mCs\|dTs\|dTs\|dGs\|dTs\|dAs\|5mCs\|oAs\|oGs\|LTs\|oTs\|oGs\|oGs\|oTs\|o5mC] |
| 2484 | [oTs\|oTs\|5mCs\|dTs\|dTs\|5mCs\|dTs\|dTs\|dGs\|dTs\|dAs\|5mCs\|oAs\|LGs\|oTs\|oTs\|oGs\|oGs\|oTs\|o5mC] |
| 2485 | [oTs\|LTs\|o5mCs\|oTs\|oTs\|o5mCs\|oTs\|dTs\|dGs\|dTs\|dAs\|5mCs\|dAs\|dGs\|dTs\|dTs\|dGs\|oGs\|oTs\|o5mC] |
| 2486 | [oTs\|oTs\|L5mCs\|oTs\|oTs\|o5mCs\|oTs\|dTs\|dGs\|dTs\|dAs\|5mCs\|dAs\|dGs\|dTs\|dTs\|dGs\|oGs\|oTs\|o5mC] |
| 2487 | [oTs\|oTs\|o5mCs\|LTs\|oTs\|o5mCs\|oTs\|dTs\|dGs\|dTs\|dAs\|5mCs\|dAs\|dGs\|dTs\|dTs\|dGs\|oGs\|oTs\|o5mC] |
| 2488 | [oTs\|oTs\|o5mCs\|oTs\|LTs\|o5mCs\|oTs\|dTs\|dGs\|dTs\|dAs\|5mCs\|dAs\|dGs\|dTs\|dTs\|dGs\|oGs\|oTs\|o5mC] |
| 2489 | [oTs\|oTs\|o5mCs\|oTs\|oTs\|L5mCs\|oTs\|dTs\|dGs\|dTs\|dAs\|5mCs\|dAs\|dGs\|dTs\|dTs\|dGs\|oGs\|oTs\|o5mC] |
| 2490 | [oTs\|oTs\|o5mCs\|dTs\|dTs\|5mCs\|dTs\|dTs\|dGs\|dTs\|dAs\|5mCs\|dAs\|oGs\|oTs\|oTs\|oGs\|oGs\|LTs\|o5mC] |
| 2491 | [oTs\|oTs\|o5mCs\|dTs\|dTs\|5mCs\|dTs\|dTs\|dGs\|dTs\|dAs\|5mCs\|dAs\|oGs\|oTs\|oTs\|oGs\|LGs\|oTs\|o5mC] |
| 2492 | [oTs\|oTs\|o5mCs\|dTs\|dTs\|5mCs\|dTs\|dTs\|dGs\|dTs\|dAs\|5mCs\|dAs\|oGs\|oTs\|oTs\|LGs\|oGs\|oTs\|o5mC] |
| 2493 | [oTs\|oTs\|o5mCs\|dTs\|dTs\|5mCs\|dTs\|dTs\|dGs\|dTs\|dAs\|5mCs\|dAs\|oGs\|oTs\|LTs\|oGs\|oGs\|oTs\|o5mC] |
| 2494 | [oTs\|oTs\|o5mCs\|dTs\|dTs\|5mCs\|dTs\|dTs\|dGs\|dTs\|dAs\|5mCs\|dAs\|oGs\|LTs\|oTs\|oGs\|oGs\|oTs\|o5mC] |
| 2495 | [oTs\|LTs\|o5mCs\|oTs\|oTs\|o5mCs\|oTs\|dTs\|dGs\|dTs\|dAs\|5mCs\|dAs\|dGs\|dTs\|dTs\|dGs\|oGs\|oT] |
| 2496 | [oTs\|oTs\|L5mCs\|oTs\|oTs\|o5mCs\|oTs\|dTs\|dGs\|dTs\|dAs\|5mCs\|dAs\|dGs\|dTs\|dTs\|dGs\|oGs\|oT] |
| 2497 | [oTs\|oTs\|o5mCs\|LTs\|oTs\|o5mCs\|oTs\|dTs\|dGs\|dTs\|dAs\|5mCs\|dAs\|dGs\|dTs\|dTs\|dGs\|oGs\|oT] |
| 2498 | [oTs\|oTs\|o5mCs\|oTs\|LTs\|o5mCs\|oTs\|dTs\|dGs\|dTs\|dAs\|5mCs\|dAs\|dGs\|dTs\|dTs\|dGs\|oGs\|oT] |
| 2499 | [oTs\|oTs\|o5mCs\|oTs\|oTs\|L5mCs\|oTs\|dTs\|dGs\|dTs\|dAs\|5mCs\|dAs\|dGs\|dTs\|dTs\|dGs\|oGs\|oT] |
| 2500 | [oTs\|o5mCs\|dTs\|dTs\|5mCs\|dTs\|dTs\|dGs\|dTs\|dAs\|5mCs\|dAs\|oGs\|oTs\|oTs\|oGs\|oGs\|LTs\|o5mC] |
| 2501 | [oTs\|o5mCs\|dTs\|dTs\|5mCs\|dTs\|dTs\|dGs\|dTs\|dAs\|5mCs\|dAs\|oGs\|oTs\|oTs\|oGs\|LGs\|oTs\|o5mC] |
| 2502 | [oTs\|o5mCs\|dTs\|dTs\|5mCs\|dTs\|dTs\|dGs\|dTs\|dAs\|5mCs\|dAs\|oGs\|oTs\|oTs\|LGs\|oGs\|oTs\|o5mC] |
| 2503 | [oTs\|o5mCs\|dTs\|dTs\|5mCs\|dTs\|dTs\|dGs\|dTs\|dAs\|5mCs\|dAs\|oGs\|oTs\|LTs\|oGs\|oGs\|oTs\|o5mC] |
| 2504 | [oTs\|o5mCs\|dTs\|dTs\|5mCs\|dTs\|dTs\|dGs\|dTs\|dAs\|5mCs\|dAs\|oGs\|LTs\|oTs\|oGs\|oGs\|oTs\|o5mC] |
| 2505 | [oTs\|LTs\|o5mCs\|oTs\|oTs\|o5mCs\|dTs\|dTs\|dGs\|dTs\|dAs\|5mCs\|dAs\|dGs\|dTs\|dTs\|oGs\|oGs\|oTs\|o5mC] |
| 2506 | [oTs\|oTs\|L5mCs\|oTs\|oTs\|o5mCs\|dTs\|dTs\|dGs\|dTs\|dAs\|5mCs\|dAs\|dGs\|dTs\|dTs\|oGs\|oGs\|oTs\|o5mC] |
| 2507 | [oTs\|oTs\|o5mCs\|LTs\|oTs\|o5mCs\|dTs\|dTs\|dGs\|dTs\|dAs\|5mCs\|dAs\|dGs\|dTs\|dTs\|oGs\|oGs\|oTs\|o5mC] |
| 2508 | [oTs\|oTs\|o5mCs\|oTs\|LTs\|o5mCs\|dTs\|dTs\|dGs\|dTs\|dAs\|5mCs\|dAs\|dGs\|dTs\|dTs\|oGs\|oGs\|oTs\|o5mC] |
| 2509 | [oTs\|oTs\|o5mCs\|oTs\|dTs\|5mCs\|dTs\|dTs\|dGs\|dTs\|dAs\|5mCs\|dAs\|dGs\|oTs\|oTs\|oGs\|oGs\|LTs\|o5mC] |
| 2510 | [oTs\|oTs\|o5mCs\|oTs\|dTs\|5mCs\|dTs\|dTs\|dGs\|dTs\|dAs\|5mCs\|dAs\|dGs\|oTs\|oTs\|oGs\|LGs\|oTs\|o5mC] |
| 2511 | [oTs\|oTs\|o5mCs\|oTs\|dTs\|5mCs\|dTs\|dTs\|dGs\|dTs\|dAs\|5mCs\|dAs\|dGs\|oTs\|oTs\|LGs\|oGs\|oTs\|o5mC] |
| 2512 | [oTs\|oTs\|o5mCs\|oTs\|dTs\|5mCs\|dTs\|dTs\|dGs\|dTs\|dAs\|5mCs\|dAs\|dGs\|oTs\|LTs\|oGs\|oGs\|oTs\|o5mC] |
| 2513 | [oTs\|LTs\|o5mCs\|oTs\|oTs\|o5mCs\|dTs\|dTs\|dGs\|dTs\|dAs\|5mCs\|dAs\|dGs\|dTs\|dTs\|oGs\|oGs\|oT] |
| 2514 | [oTs\|oTs\|L5mCs\|oTs\|oTs\|o5mCs\|dTs\|dTs\|dGs\|dTs\|dAs\|5mCs\|dAs\|dGs\|dTs\|dTs\|oGs\|oGs\|oT] |
| 2515 | [oTs\|oTs\|o5mCs\|LTs\|oTs\|o5mCs\|dTs\|dTs\|dGs\|dTs\|dAs\|5mCs\|dAs\|dGs\|dTs\|dTs\|oGs\|oGs\|oT] |
| 2516 | [oTs\|oTs\|o5mCs\|oTs\|LTs\|o5mCs\|dTs\|dTs\|dGs\|dTs\|dAs\|5mCs\|dAs\|dGs\|dTs\|dTs\|oGs\|oGs\|oT] |
| 2517 | [oTs\|oTs\|o5mCs\|dTs\|dTs\|5mCs\|dTs\|dTs\|dGs\|dTs\|dAs\|5mCs\|dAs\|dGs\|oTs\|oTs\|oGs\|oGs\|LTs\|o5mC] |
| 2518 | [oTs\|oTs\|o5mCs\|dTs\|dTs\|5mCs\|dTs\|dTs\|dGs\|dTs\|dAs\|5mCs\|dAs\|dGs\|oTs\|oTs\|oGs\|LGs\|oTs\|o5mC] |
| 2519 | [oTs\|oTs\|o5mCs\|dTs\|dTs\|5mCs\|dTs\|dTs\|dGs\|dTs\|dAs\|5mCs\|dAs\|dGs\|oTs\|oTs\|LGs\|oGs\|oTs\|o5mC] |
| 2520 | [oTs\|LTs\|o5mCs\|oTs\|oTs\|o5mCs\|dTs\|dTs\|dGs\|dTs\|dAs\|5mCs\|dAs\|dGs\|dTs\|dTs\|oGs\|oG] |
| 2521 | [oTs\|oTs\|L5mCs\|oTs\|oTs\|o5mCs\|dTs\|dTs\|dGs\|dTs\|dAs\|5mCs\|dAs\|dGs\|dTs\|dTs\|oGs\|oG] |
| 2522 | [oTs\|oTs\|o5mCs\|LTs\|oTs\|o5mCs\|dTs\|dTs\|dGs\|dTs\|dAs\|5mCs\|dAs\|dGs\|dTs\|dTs\|oGs\|oG] |
| 2523 | [oTs\|oTs\|o5mCs\|oTs\|LTs\|o5mCs\|dTs\|dTs\|dGs\|dTs\|dAs\|5mCs\|dAs\|dGs\|dTs\|dTs\|oGs\|oG] |
| 2524 | [o5mCs\|oTs\|dTs\|5mCs\|dTs\|dTs\|dGs\|dTs\|dAs\|5mCs\|dAs\|dGs\|oTs\|oTs\|oGs\|oGs\|LTs\|o5mC] |
| 2525 | [o5mCs\|oTs\|dTs\|5mCs\|dTs\|dTs\|dGs\|dTs\|dAs\|5mCs\|dAs\|dGs\|oTs\|oTs\|oGs\|LGs\|oTs\|o5mC] |
| 2526 | [o5mCs\|oTs\|dTs\|5mCs\|dTs\|dTs\|dGs\|dTs\|dAs\|5mCs\|dAs\|dGs\|oTs\|oTs\|oGs\|oGs\|oTs\|o5mC] |
| 2527 | [o5mCs\|oTs\|dTs\|5mCs\|dTs\|dTs\|dGs\|dTs\|dAs\|5mCs\|dAs\|dGs\|oTs\|LTs\|oGs\|oGs\|oTs\|o5mC] |
| 2528 | [oTs\|LTs\|o5mCs\|oTs\|oTs\|5mCs\|dTs\|dTs\|dGs\|dTs\|dAs\|5mCs\|dAs\|dGs\|dTs\|oTs\|oGs\|oGs\|oTs\|o5mC] |
| 2529 | [oTs\|oTs\|L5mCs\|oTs\|oTs\|5mCs\|dTs\|dTs\|dGs\|dTs\|dAs\|5mCs\|dAs\|dGs\|dTs\|oTs\|oGs\|oGs\|oTs\|o5mC] |
| 2530 | [oTs\|oTs\|o5mCs\|LTs\|oTs\|5mCs\|dTs\|dTs\|dGs\|dTs\|dAs\|5mCs\|dAs\|dGs\|dTs\|oTs\|oGs\|oGs\|oTs\|o5mC] |
| 2531 | [oTs\|oTs\|o5mCs\|oTs\|oTs\|5mCs\|dTs\|dTs\|dGs\|dTs\|dAs\|5mCs\|dAs\|dGs\|dTs\|oTs\|oGs\|oGs\|LTs\|o5mC] |
| 2532 | [oTs\|oTs\|o5mCs\|oTs\|oTs\|5mCs\|dTs\|dTs\|dGs\|dTs\|dAs\|5mCs\|dAs\|dGs\|dTs\|oTs\|oGs\|LGs\|oTs\|o5mC] |
| 2533 | [oTs\|oTs\|o5mCs\|oTs\|oTs\|5mCs\|dTs\|dTs\|dGs\|dTs\|dAs\|5mCs\|dAs\|dGs\|dTs\|oTs\|LGs\|oGs\|oTs\|o5mC] |
| 2534 | [oTs\|LTs\|o5mCs\|oTs\|oTs\|5mCs\|dTs\|dTs\|dGs\|dTs\|dAs\|5mCs\|dAs\|dGs\|dTs\|oTs\|oGs\|oGs\|oT] |
| 2535 | [oTs\|oTs\|L5mCs\|oTs\|oTs\|5mCs\|dTs\|dTs\|dGs\|dTs\|dAs\|5mCs\|dAs\|dGs\|dTs\|oTs\|oGs\|oGs\|oT] |
| 2536 | [oTs\|oTs\|o5mCs\|LTs\|oTs\|5mCs\|dTs\|dTs\|dGs\|dTs\|dAs\|5mCs\|dAs\|dGs\|dTs\|oTs\|oGs\|oGs\|oT] |
| 2537 | [oTs\|o5mCs\|oTs\|oTs\|5mCs\|dTs\|dTs\|dGs\|dTs\|dAs\|5mCs\|dAs\|dGs\|dTs\|oTs\|oGs\|oGs\|LTs\|o5mC] |
| 2538 | [oTs\|o5mCs\|oTs\|oTs\|5mCs\|dTs\|dTs\|dGs\|dTs\|dAs\|5mCs\|dAs\|dGs\|dTs\|oTs\|oGs\|LGs\|oTs\|o5mC] |
| 2539 | [oTs\|o5mCs\|oTs\|oTs\|5mCs\|dTs\|dTs\|dGs\|dTs\|dAs\|5mCs\|dAs\|dGs\|dTs\|oTs\|LGs\|oGs\|oTs\|o5mC] |
| 2540 | [oTs\|LTs\|o5mCs\|oTs\|oTs\|5mCs\|dTs\|dTs\|dGs\|dTs\|dAs\|5mCs\|dAs\|dGs\|dTs\|oTs\|oGs\|oG] |
| 2541 | [oTs\|oTs\|L5mCs\|oTs\|oTs\|5mCs\|dTs\|dTs\|dGs\|dTs\|dAs\|5mCs\|dAs\|dGs\|dTs\|oTs\|oGs\|oG] |
| 2542 | [oTs\|oTs\|o5mCs\|LTs\|oTs\|5mCs\|dTs\|dTs\|dGs\|dTs\|dAs\|5mCs\|dAs\|dGs\|dTs\|oTs\|oGs\|oG] |
| 2543 | [o5mCs\|oTs\|oTs\|5mCs\|dTs\|dTs\|dGs\|dTs\|dAs\|5mCs\|dAs\|dGs\|dTs\|oTs\|oGs\|oGs\|LTs\|o5mC] |
| 2544 | [o5mCs\|oTs\|oTs\|5mCs\|dTs\|dTs\|dGs\|dTs\|dAs\|5mCs\|dAs\|dGs\|dTs\|oTs\|oGs\|LGs\|oTs\|o5mC] |
| 2545 | [o5mCs\|oTs\|oTs\|5mCs\|dTs\|dTs\|dGs\|dTs\|dAs\|5mCs\|dAs\|dGs\|dTs\|oTs\|LGs\|oGs\|oTs\|o5mC] |
| 2546 | [oTs\|LTs\|o5mCs\|oTs\|oTs\|5mCs\|dTs\|dTs\|dGs\|dTs\|dAs\|5mCs\|dAs\|dGs\|dTs\|oTs\|oG] |
| 2547 | [oTs\|oTs\|L5mCs\|oTs\|oTs\|5mCs\|dTs\|dTs\|dGs\|dTs\|dAs\|5mCs\|dAs\|dGs\|dTs\|oTs\|oG] |
| 2548 | [oTs\|oTs\|o5mCs\|LTs\|oTs\|5mCs\|dTs\|dTs\|dGs\|dTs\|dAs\|5mCs\|dAs\|dGs\|dTs\|oTs\|oG] |
| 2549 | [oTs\|oTs\|5mCs\|dTs\|dTs\|dGs\|dTs\|dAs\|5mCs\|dAs\|dGs\|dTs\|oTs\|oGs\|oGs\|LTs\|o5mC] |
| 2550 | [oTs\|oTs\|5mCs\|dTs\|dTs\|dGs\|dTs\|dAs\|5mCs\|dAs\|dGs\|dTs\|oTs\|oGs\|LGs\|oTs\|o5mC] |
| 2551 | [oTs\|oTs\|5mCs\|dTs\|dTs\|dGs\|dTs\|dAs\|5mCs\|dAs\|dGs\|dTs\|oTsILGs\|oGs\|oTs\|o5mC] |
| 2552 | [oTs\|L5mCs\|oTs\|oTs\|5mCs\|dTs\|dTs\|dGs\|dTs\|dAs\|5mCs\|dAs\|dGs\|dTs\|oTs\|oGs\|oGs\|oTs\|o5mC] |
| 2553 | [oTs\|o5mCs\|LTs\|oTs\|5mCs\|dTs\|dTs\|dGs\|dTs\|dAs\|5mCs\|dAs\|dGs\|dTs\|oTs\|oGs\|oGs\|oTs\|o5mC] |
| 2554 | [oTs\|oTs\|o5mCs\|oTs\|oTs\|5mCs\|dTs\|dTs\|dGs\|dTs\|dAs\|5mCs\|dAs\|dGs\|dTs\|oTs\|oGs\|LGs\|oT] |
| 2555 | [oTs\|oTs\|o5mCs\|oTs\|oTs\|5mCs\|dTs\|dTs\|dGs\|dTs\|dAs\|5mCs\|dAs\|dGs\|dTs\|oTs\|LGs\|oGs\|oT] |
| 2556 | [oTs\|L5mCs\|oTs\|oTs\|5mCs\|dTs\|dTs\|dGs\|dTs\|dAs\|5mCs\|dAs\|dGs\|dTs\|oTs\|oGs\|oGs\|oT] |
| 2557 | [oTs\|o5mCs\|LTs\|oTs\|5mCs\|dTs\|dTs\|dGs\|dTs\|dAs\|5mCs\|dAs\|dGs\|dTs\|oTs\|oGs\|oGs\|oT] |
| 2558 | [oTs\|o5mCs\|oTs\|oTs\|5mCs\|dTs\|dTs\|dGs\|dTs\|dAs\|5mCs\|dAs\|dGs\|dTs\|oTs\|oGs\|LGs\|oT] |
| 2559 | [oTs\|o5mCs\|oTs\|oTs\|5mCs\|dTs\|dTs\|dGs\|dTs\|dAs\|5mCs\|dAs\|dGs\|dTs\|oTs\|LGs\|oGs\|oT] |
| 2560 | [oTs\|L5mCs\|oTs\|oTs\|5mCs\|dTs\|dTs\|dGs\|dTs\|dAs\|5mCs\|dAs\|dGs\|dTs\|oTs\|oGs\|oG] |
| 2561 | [oTs\|o5mCs\|LTs\|oTs\|5mCs\|dTs\|dTs\|dGs\|dTs\|dAs\|5mCs\|dAs\|dGs\|dTs\|oTs\|oGs\|oG] |
| 2562 | [oTs\|o5mCs\|oTs\|oTs\|5mCs\|dTs\|dTs\|dGs\|dTs\|dAs\|5mCs\|dAs\|dGs\|dTs\|oTs\|LGs\|oG] |
| 2563 | [oTs\|oTs\|o5mCs\|oTs\|oTs\|o5mCs\|oTs\|oTs\|dGs\|dTs\|dAs\|5mCs\|dAs\|dGs\|dTs\|dTs\|dGs\|dGs\|oTs\|o5mC] |
| 2564 | [oTs\|oTs\|5mCs\|dTs\|dTs\|5mCs\|dTs\|dTs\|dGs\|dTs\|dAs\|5mCs\|oAs\|oGs\|oTs\|oTs\|oGs\|oGs\|oTs\|o5mC] |
| 2565 | [oTs\|oTs\|o5mCs\|oTs\|oTs\|o5mCs\|oTs\|dTs\|dGs\|dTs\|dAs\|5mCs\|dAs\|dGs\|dTs\|dTs\|dGs\|oGs\|oTs\|o5mC] |
| 2566 | [oTs\|oTs\|o5mCs\|dTs\|dTs\|5mCs\|dTs\|dTs\|dGs\|dTs\|dAs\|5mCs\|dAs\|oGs\|oTs\|oTs\|oGs\|oGs\|oTs\|o5mC] |
| 2567 | [oTs\|oTs\|o5mCs\|oTs\|oTs\|o5mCs\|oTs\|dTs\|dGs\|dTs\|dAs\|5mCs\|dAs\|dGs\|dTs\|dTs\|dGs\|oGs\|oT] |
| 2568 | [oTs\|o5mCs\|dTs\|dTs\|5mCs\|dTs\|dTs\|dGs\|dTs\|dAs\|5mCs\|dAs\|oGs\|oTs\|oTs\|oGs\|oGs\|oTs\|o5mC] |
| 2569 | [oTs\|oTs\|o5mCs\|oTs\|oTs\|o5mCs\|dTs\|dTs\|dGs\|dTs\|dAs\|5mCs\|dAs\|dGs\|dTs\|dTs\|oGs\|oGs\|oTs\|o5mC] |
| 2570 | [oTs\|oTs\|o5mCs\|oTs\|dTs\|5mCs\|dTs\|dTs\|dGs\|dTs\|dAs\|5mCs\|dAs\|dGs\|oTs\|oTs\|oGs\|oGs\|oTs\|o5mC] |
| 2571 | [oTs\|oTs\|o5mCs\|oTs\|oTs\|o5mCs\|dTs\|dTs\|dGs\|dTs\|dAs\|5mCs\|dAs\|dGs\|dTs\|dTs\|oGs\|oGs\|oT] |
| 2572 | [oTs\|oTs\|o5mCs\|dTs\|dTs\|5mCs\|dTs\|dTs\|dGs\|dTs\|dAs\|5mCs\|dAs\|dGs\|oTs\|oTs\|oGs\|oGs\|oTs\|o5mC] |
| 2573 | [oTs\|oTs\|o5mCs\|oTs\|oTs\|o5mCs\|dTs\|dTs\|dGs\|dTs\|dAs\|5mCs\|dAs\|dGs\|dTs\|dTs\|oGs\|oG] |
| 2574 | [o5mCs\|oTs\|dTs\|5mCs\|dTs\|dTs\|dGs\|dTs\|dAs\|5mCs\|dAs\|dGs\|oTs\|oTs\|oGs\|oGs\|oTs\|o5mC] |
| 2575 | [oTs\|oTs\|o5mCs\|oTs\|oTs\|5mCs\|dTs\|dTs\|dGs\|dTs\|dAs\|5mCs\|dAs\|dGs\|dTs\|oTs\|oGs\|oGs\|oTs\|o5mC] |
| 2576 | [oTs\|oTs\|o5mCs\|oTs\|oTs\|5mCs\|dTs\|dTs\|dGs\|dTs\|dAs\|5mCs\|dAs\|dGs\|dTs\|oTs\|oGs\|oGs\|oT] |
| 2577 | [oTs\|oTs\|o5mCs\|oTs\|oTs\|5mCs\|dTs\|dTs\|dGs\|dTs\|dAs\|5mCs\|dAs\|dGs\|dTs\|oTs\|oGs\|oG] |
| 2578 | [o5mCs\|oTs\|oTs\|5mCs\|dTs\|dTs\|dGs\|dTs\|dAs\|5mCs\|dAs\|dGs\|dTs\|oTs\|oGs\|oGs\|oTs\|o5mC] |
| 2579 | [oTs\|oTs\|o5mCs\|oTs\|oTs\|5mCs\|dTs\|dTs\|dGs\|dTs\|dAs\|5mCs\|dAs\|dGs\|dTs\|oTs\|oG] |
| 2580 | [oTs\|oTs\|5mCs\|dTs\|dTs\|dGs\|dTs\|dAs\|5mCs\|dAs\|dGs\|dTs\|oTs\|oGs\|oGs\|oTs\|o5mC] |
| 2581 | [oTs\|o5mCs\|oTs\|oTs\|5mCs\|dTs\|dTs\|dGs\|dTs\|dAs\|5mCs\|dAs\|dGs\|dTs\|oTs\|oGs\|oGs\|oTs\|o5mC] |
| 2582 | [oTs\|o5mCs\|oTs\|oTs\|5mCs\|dTs\|dTs\|dGs\|dTs\|dAs\|5mCs\|dAs\|dGs\|dTs\|oTs\|oGs\|oGs\|oT] |
| 2583 | [oTs\|o5mCs\|oTs\|oTs\|5mCs\|dTs\|dTs\|dGs\|dTs\|dAs\|5mCs\|dAs\|dGs\|dTs\|oTs\|oGs\|oG] |
| 2584 | [oTs\|oTs\|o5mCp\|oTs\|oTs\|5mCs\|dTs\|dTs\|dGs\|dTs\|dAs\|5mCs\|dAs\|dGs\|dTs\|oTs\|oGs\|oGs\|oTs\|o5mC] |
| 2585 | [oTs\|oTs\|o5mCs\|oTp\|oTs\|5mCs\|dTs\|dTs\|dGs\|dTs\|dAs\|5mCs\|dAs\|dGs\|dTs\|oTs\|oGs\|oGs\|oTs\|o5mC] |
| 2586 | [oTs\|oTs\|o5mCp\|oTp\|oTs\|5mCs\|dTs\|dTs\|dGs\|dTs\|dAs\|5mCs\|dAs\|dGs\|dTs\|oTs\|oGs\|oGs\|oTs\|o5mC] |
| 2587 | [oTs\|oTs\|o5mCs\|oTs\|oTs\|5mCs\|dTs\|dTs\|dGs\|dTs\|dAs\|5mCs\|dAs\|dGs\|dTs\|oTs\|oGp\|oGs\|oTs\|o5mC] |
| 2588 | [oTs\|oTs\|o5mCs\|oTs\|oTs\|5mCs\|dTs\|dTs\|dGs\|dTs\|dAs\|5mCs\|dAs\|dGs\|dTs\|oTp\|oGs\|oGs\|oTs\|o5mC] |
| 2589 | [oTs\|oTs\|o5mCs\|oTs\|oTs\|5mCs\|dTs\|dTs\|dGs\|dTs\|dAs\|5mCs\|dAs\|dGs\|dTs\|oTp\|oGp\|oGs\|oTs\|o5mC] |
| 2590 | [oTs\|oTs\|o5mCp\|oTs\|oTs\|5mCs\|dTs\|dTs\|dGs\|dTs\|dAs\|5mCs\|dAs\|dGs\|dTs\|oTs\|oGp\|oGs\|oTs\|o5mC] |
| 2591 | [oTs\|oTs\|o5mCp\|oTs\|oTs\|5mCs\|dTs\|dTs\|dGs\|dTs\|dAs\|5mCs\|dAs\|dGs\|dTs\|oTp\|oGs\|oGs\|oTs\|o5mC] |
| 2592 | [oTs\|oTs\|o5mCs\|oTp\|oTs\|5mCs\|dTs\|dTs\|dGs\|dTs\|dAs\|5mCs\|dAs\|dGs\|dTs\|oTs\|oGp\|oGs\|oTs\|o5mC] |
| 2593 | [oTs\|oTs\|o5mCs\|oTp\|oTs\|5mCs\|dTs\|dTs\|dGs\|dTs\|dAs\|5mCs\|dAs\|dGs\|dTs\|oTp\|oGs\|oGs\|oTs\|o5mC] |
| 2594 | [oTs\|oTs\|o5mCp\|oTs\|oTs\|5mCs\|dTs\|dTs\|dGs\|dTs\|dAs\|5mCs\|dAs\|dGs\|dTs\|oTp\|oGp\|oGs\|oTs\|o5mC] |
| 2595 | [oTs\|oTs\|o5mCs\|oTp\|oTs\|5mCs\|dTs\|dTs\|dGs\|dTs\|dAs\|5mCs\|dAs\|dGs\|dTs\|oTp\|oGp\|oGs\|oTs\|o5mC] |
| 2596 | [oTs\|oTs\|o5mCp\|oTp\|oTs\|5mCs\|dTs\|dTs\|dGs\|dTs\|dAs\|5mCs\|dAs\|dGs\|dTs\|oTs\|oGp\|oGs\|oTs\|o5mC] |
| 2597 | [oTs\|oTs\|o5mCp\|oTp\|oTs\|5mCs\|dTs\|dTs\|dGs\|dTs\|dAs\|5mCs\|dAs\|dGs\|dTs\|oTp\|oGs\|oGs\|oTs\|o5mC] |
| 2598 | [oTs\|oTs\|o5mCp\|oTp\|oTs\|5mCs\|dTs\|dTs\|dGs\|dTs\|dAs\|5mCs\|dAs\|dGs\|dTs\|oTp\|oGp\|oGs\|oTs\|o5mC] |
| 2599 | [oTs\|oTs\|o5mCs\|oTs\|oTs\|5mCs\|dTs\|dTs\|dGs\|dTs\|dAs\|5mCs\|dAs\|dGs\|dTs\|oTs\|oGs\|oGs\|oTs\|o5mCs\|oT] |
| 2600 | [oTs\|oTs\|o5mCp\|oTs\|oTs\|5mCs\|dTs\|dTs\|dGs\|dTs\|dAs\|5mCs\|dAs\|dGs\|dTs\|oTs\|oGs\|oGs\|oTs\|o5mCs\|oT] |
| 2601 | [oTs\|oTs\|o5mCs\|oTp\|oTs\|5mCs\|dTs\|dTs\|dGs\|dTs\|dAs\|5mCs\|dAs\|dGs\|dTs\|oTs\|oGs\|oGs\|oTs\|o5mCs\|oT] |
| 2602 | [oTs\|oTs\|o5mCp\|oTp\|oTs\|5mCs\|dTs\|dTs\|dGs\|dTs\|dAs\|5mCs\|dAs\|dGs\|dTs\|oTs\|oGs\|oGs\|oTs\|o5mCs\|oT] |
| 2603 | [oTs\|oTs\|o5mCs\|oTs\|oTs\|5mCs\|dTs\|dTs\|dGs\|dTs\|dAs\|5mCs\|dAs\|dGs\|dTs\|oTs\|oGp\|oGs\|oTs\|o5mCs\|oT] |
| 2604 | [oTs\|oTs\|o5mCs\|oTs\|oTs\|5mCs\|dTs\|dTs\|dGs\|dTs\|dAs\|5mCs\|dAs\|dGs\|dTs\|oTp\|oGs\|oGs\|oTs\|o5mCs\|oT] |
| 2605 | [oTs\|oTs\|o5mCs\|oTs\|oTs\|5mCs\|dTs\|dTs\|dGs\|dTs\|dAs\|5mCs\|dAs\|dGs\|dTs\|oTp\|oGp\|oGs\|oTs\|o5mCs\|oT] |
| 2606 | [oTs\|oTs\|o5mCp\|oTs\|oTs\|5mCs\|dTs\|dTs\|dGs\|dTs\|dAs\|5mCs\|dAs\|dGs\|dTs\|oTs\|oGp\|oGs\|oTs\|o5mCs\|oT] |
| 2607 | [oTs\|oTs\|o5mCp\|oTs\|oTs\|5mCs\|dTs\|dTs\|dGs\|dTs\|dAs\|5mCs\|dAs\|dGs\|dTs\|oTp\|oGs\|oGs\|oTs\|o5mCs\|oT] |
| 2608 | [oTs\|oTs\|o5mCs\|oTp\|oTs\|5mCs\|dTs\|dTs\|dGs\|dTs\|dAs\|5mCs\|dAs\|dGs\|dTs\|oTs\|oGp\|oGs\|oTs\|o5mCs\|oT] |
| 2609 | [oTs\|oTs\|o5mCs\|oTp\|oTs\|5mCs\|dTs\|dTs\|dGs\|dTs\|dAs\|5mCs\|dAs\|dGs\|dTs\|oTp\|oGs\|oGs\|oTs\|o5mCs\|oT] |
| 2610 | [oTs\|oTs\|o5mCp\|oTs\|oTs\|5mCs\|dTs\|dTs\|dGs\|dTs\|dAs\|5mCs\|dAs\|dGs\|dTs\|oTp\|oGp\|oGs\|oTs\|o5mCs\|oT] |
| 2611 | [oTs\|oTs\|o5mCs\|oTp\|oTs\|5mCs\|dTs\|dTs\|dGs\|dTs\|dAs\|5mCs\|dAs\|dGs\|dTs\|oTp\|oGp\|oGs\|oTs\|o5mCs\|oT] |
| 2612 | [oTs\|oTs\|o5mCp\|oTp\|oTs\|5mCs\|dTs\|dTs\|dGs\|dTs\|dAs\|5mCs\|dAs\|dGs\|dTs\|oTs\|oGp\|oGs\|oTs\|o5mCs\|oT] |
| 2613 | [oTs\|oTs\|o5mCp\|oTp\|oTs\|5mCs\|dTs\|dTs\|dGs\|dTs\|dAs\|5mCs\|dAs\|dGs\|dTs\|oTp\|oGs\|oGs\|oTs\|o5mCs\|oT] |
| 2614 | [oTs\|oTs\|o5mCp\|oTp\|oTs\|5mCs\|dTs\|dTs\|dGs\|dTs\|dAs\|5mCs\|dAs\|dGs\|dTs\|oTp\|oGp\|oGs\|oTs\|o5mCs\|oT] |
| 2615 | [oTs\|oTs\|o5mCs\|oTs\|oTs\|5mCs\|dTs\|dTs\|dGs\|dTs\|dAs\|5mCs\|dAs\|dGs\|dTs\|oTs\|oGs\|oGs\|oTs\|o5mCs\|oTs\|oG] |
| 2616 | [oTs\|oTs\|o5mCp\|oTs\|oTs\|5mCs\|dTs\|dTs\|dGs\|dTs\|dAs\|5mCs\|dAs\|dGs\|dTs\|oTs\|oGs\|oGs\|oTs\|o5mCs\|oTs\|oG] |
| 2617 | [oTs\|oTs\|o5mCs\|oTp\|oTs\|5mCs\|dTs\|dTs\|dGs\|dTs\|dAs\|5mCs\|dAs\|dGs\|dTs\|oTs\|oGs\|oGs\|oTs\|o5mCs\|oTs\|oG] |
| 2618 | [oTs\|oTs\|o5mCp\|oTp\|oTs\|5mCs\|dTs\|dTs\|dGs\|dTs\|dAs\|5mCs\|dAs\|dGs\|dTs\|oTs\|oGs\|oGs\|oTs\|o5mCs\|oTs\|oG] |
| 2619 | [oTs\|oTs\|o5mCs\|oTs\|oTs\|5mCs\|dTs\|dTs\|dGs\|dTs\|dAs\|5mCs\|dAs\|dGs\|dTs\|oTs\|oGp\|oGs\|oTs\|o5mCs\|oTs\|oG] |
| 2620 | [oTs\|oTs\|o5mCs\|oTs\|oTs\|5mCs\|dTs\|dTs\|dGs\|dTs\|dAs\|5mCs\|dAs\|dGs\|dTs\|oTp\|oGs\|oGs\|oTs\|o5mCs\|oTs\|oG] |
| 2621 | [oTs\|oTs\|o5mCs\|oTs\|oTs\|5mCs\|dTs\|dTs\|dGs\|dTs\|dAs\|5mCs\|dAs\|dGs\|dTs\|oTp\|oGp\|oGs\|oTs\|o5mCs\|oTs\|oG] |
| 2622 | [oTs\|oTs\|o5mCp\|oTs\|oTs\|5mCs\|dTs\|dTs\|dGs\|dTs\|dAs\|5mCs\|dAs\|dGs\|dTs\|oTs\|oGp\|oGs\|oTs\|o5mCs\|oTs\|oG] |
| 2623 | [oTs\|oTs\|o5mCp\|oTs\|oTs\|5mCs\|dTs\|dTs\|dGs\|dTs\|dAs\|5mCs\|dAs\|dGs\|dTs\|oTp\|oGs\|oGs\|oTs\|o5mCs\|oTs\|oG] |
| 2624 | [oTs\|oTs\|o5mCs\|oTp\|oTs\|5mCs\|dTs\|dTs\|dGs\|dTs\|dAs\|5mCs\|dAs\|dGs\|dTs\|oTs\|oGp\|oGs\|oTs\|o5mCs\|oTs\|oG] |
| 2625 | [oTs\|oTs\|o5mCs\|oTp\|oTs\|5mCs\|dTs\|dTs\|dGs\|dTs\|dAs\|5mCs\|dAs\|dGs\|dTs\|oTp\|oGs\|oGs\|oTs\|o5mCs\|oTs\|oG] |
| 2626 | [oTs\|oTs\|o5mCp\|oTs\|oTs\|5mCs\|dTs\|dTs\|dGs\|dTs\|dAs\|5mCs\|dAs\|dGs\|dTs\|oTp\|oGp\|oGs\|oTs\|o5mCs\|oTs\|oG] |
| 2627 | [oTs\|oTs\|o5mCs\|oTp\|oTs\|5mCs\|dTs\|dTs\|dGs\|dTs\|dAs\|5mCs\|dAs\|dGs\|dTs\|oTp\|oGp\|oGs\|oTs\|o5mCs\|oTs\|oG] |
| 2628 | [oTs\|oTs\|o5mCp\|oTp\|oTs\|5mCs\|dTs\|dTs\|dGs\|dTs\|dAs\|5mCs\|dAs\|dGs\|dTs\|oTs\|oGp\|oGs\|oTs\|o5mCs\|oTs\|oG] |
| 2629 | [oTs\|oTs\|o5mCp\|oTp\|oTs\|5mCs\|dTs\|dTs\|dGs\|dTs\|dAs\|5mCs\|dAs\|dGs\|dTs\|oTp\|oGs\|oGs\|oTs\|o5mCs\|oTs\|oG] |
| 2630 | [oTs\|oTs\|o5mCp\|oTp\|oTs\|5mCs\|dTs\|dTs\|dGs\|dTs\|dAs\|5mCs\|dAs\|dGs\|dTs\|oTp\|oGp\|oGs\|oTs\|o5mCs\|oTs\|oG] |
| 2631 | [oTs\|oTs\|o5mCs\|oTs\|oTs\|5mCs\|dTs\|dTs\|dGs\|dTs\|dAs\|5mCs\|dAs\|dGs\|dTs\|oTs\|oGs\|oGs\|oTs\|o5mCs\|oTs\|oGs\|o5mC] |
| 2632 | [oTs\|oTs\|o5mCp\|oTs\|oTs\|5mCs\|dTs\|dTs\|dGs\|dTs\|dAs\|5mCs\|dAs\|dGs\|dTs\|oTs\|oGs\|oGs\|oTs\|o5mCs\|oTs\|oGs\|o5mC] |
| 2633 | [oTs\|oTs\|o5mCs\|oTp\|oTs\|5mCs\|dTs\|dTs\|dGs\|dTs\|dAs\|5mCs\|dAs\|dGs\|dTs\|oTs\|oGs\|oGs\|oTs\|o5mCs\|oTs\|oGs\|o5mC] |
| 2634 | [oTs\|oTs\|o5mCp\|oTp\|oTs\|5mCs\|dTs\|dTs\|dGs\|dTs\|dAs\|5mCs\|dAs\|dGs\|dTs\|oTs\|oGs\|oGs\|oTs\|o5mCs\|oTs\|oGs\|o5mC] |
| 2635 | [oTs\|oTs\|o5mCs\|oTs\|oTs\|5mCs\|dTs\|dTs\|dGs\|dTs\|dAs\|5mCs\|dAs\|dGs\|dTs\|oTs\|oGp\|oGs\|oTs\|o5mCs\|oTs\|oGs\|o5mC] |
| 2636 | [oTs\|oTs\|o5mCs\|oTs\|oTs\|5mCs\|dTs\|dTs\|dGs\|dTs\|dAs\|5mCs\|dAs\|dGs\|dTs\|oTp\|oGs\|oGs\|oTs\|o5mCs\|oTs\|oGs\|o5mC] |
| 2637 | [oTs\|oTs\|o5mCs\|oTs\|oTs\|5mCs\|dTs\|dTs\|dGs\|dTs\|dAs\|5mCs\|dAs\|dGs\|dTs\|oTp\|oGp\|oGs\|oTs\|o5mCs\|oTs\|oGs\|o5mC] |
| 2638 | [oTs\|oTs\|o5mCp\|oTs\|oTs\|5mCs\|dTs\|dTs\|dGs\|dTs\|dAs\|5mCs\|dAs\|dGs\|dTs\|oTs\|oGp\|oGs\|oTs\|o5mCs\|oTs\|oGs\|o5mC] |
| 2639 | [oTs\|oTs\|o5mCp\|oTs\|oTs\|5mCs\|dTs\|dTs\|dGs\|dTs\|dAs\|5mCs\|dAs\|dGs\|dTs\|oTp\|oGs\|oGs\|oTs\|o5mCs\|oTs\|oGs\|o5mC] |
| 2640 | [oTs\|oTs\|o5mCs\|oTp\|oTs\|5mCs\|dTs\|dTs\|dGs\|dTs\|dAs\|5mCs\|dAs\|dGs\|dTs\|oTs\|oGp\|oGs\|oTs\|o5mCs\|oTs\|oGs\|o5mC] |
| 2641 | [oTs\|oTs\|o5mCs\|oTp\|oTs\|5mCs\|dTs\|dTs\|dGs\|dTs\|dAs\|5mCs\|dAs\|dGs\|dTs\|oTp\|oGs\|oGs\|oTs\|o5mCs\|oTs\|oGs\|o5mC] |
| 2642 | [oTs\|oTs\|o5mCp\|oTs\|oTs\|5mCs\|dTs\|dTs\|dGs\|dTs\|dAs\|5mCs\|dAs\|dGs\|dTs\|oTp\|oGp\|oGs\|oTs\|o5mCs\|oTs\|oGs\|o5mC] |
| 2643 | [oTs\|oTs\|o5mCs\|oTp\|oTs\|5mCs\|dTs\|dTs\|dGs\|dTs\|dAs\|5mCs\|dAs\|dGs\|dTs\|oTp\|oGp\|oGs\|oTs\|o5mCs\|oTs\|oGs\|o5mC] |
| 2644 | [oTs\|oTs\|o5mCp\|oTp\|oTs\|5mCs\|dTs\|dTs\|dGs\|dTs\|dAs\|5mCs\|dAs\|dGs\|dTs\|oTs\|oGp\|oGs\|oTs\|o5mCs\|oTs\|oGs\|o5mC] |
| 2645 | [oTs\|oTs\|o5mCp\|oTp\|oTs\|5mCs\|dTs\|dTs\|dGs\|dTs\|dAs\|5mCs\|dAs\|dGs\|dTs\|oTp\|oGs\|oGs\|oTs\|o5mCs\|oTs\|oGs\|o5mC] |
| 2646 | [oTs\|oTs\|o5mCp\|oTp\|oTs\|5mCs\|dTs\|dTs\|dGs\|dTs\|dAs\|5mCs\|dAs\|dGs\|dTs\|oTp\|oGp\|oGs\|oTs\|o5mCs\|oTs\|oGs\|o5mC] |
| 2647 | [oTs\|oTs\|o5mCs\|oTs\|oTs\|5mCs\|dTs\|dTs\|dGs\|dTs\|dAs\|5mCs\|dAs\|dGs\|dTs\|dTs\|oGs\|oGs\|oTs\|o5mCs\|oT] |
| 2648 | [oTs\|oTs\|o5mCp\|oTs\|oTs\|5mCs\|dTs\|dTs\|dGs\|dTs\|dAs\|5mCs\|dAs\|dGs\|dTs\|dTs\|oGs\|oGs\|oTs\|o5mCs\|oT] |
| 2649 | [oTs\|oTs\|o5mCs\|oTp\|oTs\|5mCs\|dTs\|dTs\|dGs\|dTs\|dAs\|5mCs\|dAs\|dGs\|dTs\|dTs\|oGs\|oGs\|oTs\|o5mCs\|oT] |
| 2650 | [oTs\|oTs\|o5mCp\|oTp\|oTs\|5mCs\|dTs\|dTs\|dGs\|dTs\|dAs\|5mCs\|dAs\|dGs\|dTs\|dTs\|oGs\|oGs\|oTs\|o5mCs\|oT] |
| 2651 | [oTs\|oTs\|o5mCs\|oTs\|oTs\|5mCs\|dTs\|dTs\|dGs\|dTs\|dAs\|5mCs\|dAs\|dGs\|dTs\|dTs\|oGp\|oGs\|oTs\|o5mCs\|oT] |
| 2652 | [oTs\|oTs\|o5mCs\|oTs\|oTs\|5mCs\|dTs\|dTs\|dGs\|dTs\|dAs\|5mCs\|dAs\|dGs\|dTs\|dTp\|oGs\|oGs\|oTs\|o5mCs\|oT] |
| 2653 | [oTs\|oTs\|o5mCs\|oTs\|oTs\|5mCs\|dTs\|dTs\|dGs\|dTs\|dAs\|5mCs\|dAs\|dGs\|dTs\|dTp\|oGp\|oGs\|oTs\|o5mCs\|oT] |
| 2654 | [oTs\|oTs\|o5mCp\|oTs\|oTs\|5mCs\|dTs\|dTs\|dGs\|dTs\|dAs\|5mCs\|dAs\|dGs\|dTs\|dTs\|oGp\|oGs\|oTs\|o5mCs\|oT] |
| 2655 | [oTs\|oTs\|o5mCp\|oTs\|oTs\|5mCs\|dTs\|dTs\|dGs\|dTs\|dAs\|5mCs\|dAs\|dGs\|dTs\|dTp\|oGs\|oGs\|oTs\|o5mCs\|oT] |
| 2656 | [oTs\|oTs\|o5mCs\|oTp\|oTs\|5mCs\|dTs\|dTs\|dGs\|dTs\|dAs\|5mCs\|dAs\|dGs\|dTs\|dTs\|oGp\|oGs\|oTs\|o5mCs\|oT] |
| 2657 | [oTs\|oTs\|o5mCs\|oTp\|oTs\|5mCs\|dTs\|dTs\|dGs\|dTs\|dAs\|5mCs\|dAs\|dGs\|dTs\|dTp\|oGs\|oGs\|oTs\|o5mCs\|oT] |
| 2658 | [oTs\|oTs\|o5mCp\|oTs\|oTs\|5mCs\|dTs\|dTs\|dGs\|dTs\|dAs\|5mCs\|dAs\|dGs\|dTs\|dTp\|oGp\|oGs\|oTs\|o5mCs\|oT] |
| 2659 | [oTs\|oTs\|o5mCs\|oTp\|oTs\|5mCs\|dTs\|dTs\|dGs\|dTs\|dAs\|5mCs\|dAs\|dGs\|dTs\|dTp\|oGp\|oGs\|oTs\|o5mCs\|oT] |
| 2660 | [oTs\|oTs\|o5mCp\|oTp\|oTs\|5mCs\|dTs\|dTs\|dGs\|dTs\|dAs\|5mCs\|dAs\|dGs\|dTs\|dTs\|oGp\|oGs\|oTs\|o5mCs\|oT] |
| 2661 | [oTs\|oTs\|o5mCp\|oTp\|oTs\|5mCs\|dTs\|dTs\|dGs\|dTs\|dAs\|5mCs\|dAs\|dGs\|dTs\|dTp\|oGs\|oGs\|oTs\|o5mCs\|oT] |
| 2662 | [oTs\|oTs\|o5mCp\|oTp\|oTs\|5mCs\|dTs\|dTs\|dGs\|dTs\|dAs\|5mCs\|dAs\|dGs\|dTs\|dTp\|oGp\|oGs\|oTs\|o5mCs\|oT] |
| 2663 | [oTs\|oTs\|o5mCs\|oTs\|oTs\|5mCs\|dTs\|dTs\|dGs\|dTs\|dAs\|5mCs\|dAs\|dGs\|dTs\|dTs\|dGs\|oGs\|oTs\|o5mCs\|oTs\|oG] |
| 2664 | [oTs\|oTs\|o5mCp\|oTs\|oTs\|5mCs\|dTs\|dTs\|dGs\|dTs\|dAs\|5mCs\|dAs\|dGs\|dTs\|dTs\|dGs\|oGs\|oTs\|o5mCs\|oTs\|oG] |
| 2665 | [oTs\|oTs\|o5mCs\|oTp\|oTs\|5mCs\|dTs\|dTs\|dGs\|dTs\|dAs\|5mCs\|dAs\|dGs\|dTs\|dTs\|dGs\|oGs\|oTs\|o5mCs\|oTs\|oG] |
| 2666 | [oTs\|oTs\|o5mCp\|oTp\|oTs\|5mCs\|dTs\|dTs\|dGs\|dTs\|dAs\|5mCs\|dAs\|dGs\|dTs\|dTs\|dGs\|oGs\|oTs\|o5mCs\|oTs\|oG] |
| 2667 | [oTs\|oTs\|o5mCs\|oTs\|oTs\|5mCs\|dTs\|dTs\|dGs\|dTs\|dAs\|5mCs\|dAs\|dGs\|dTs\|dTs\|dGp\|oGs\|oTs\|o5mCs\|oTs\|oG] |
| 2668 | [oTs\|oTs\|o5mCs\|oTs\|oTs\|5mCs\|dTs\|dTs\|dGs\|dTs\|dAs\|5mCs\|dAs\|dGs\|dTs\|dTp\|dGs\|oGs\|oTs\|o5mCs\|oTs\|oG] |
| 2669 | [oTs\|oTs\|o5mCs\|oTs\|oTs\|5mCs\|dTs\|dTs\|dGs\|dTs\|dAs\|5mCs\|dAs\|dGs\|dTs\|dTp\|dGp\|oGs\|oTs\|o5mCs\|oTs\|oG] |
| 2670 | [oTs\|oTs\|o5mCp\|oTs\|oTs\|5mCs\|dTs\|dTs\|dGs\|dTs\|dAs\|5mCs\|dAs\|dGs\|dTs\|dTs\|dGp\|oGs\|oTs\|o5mCs\|oTs\|oG] |
| 2671 | [oTs\|oTs\|o5mCp\|oTs\|oTs\|5mCs\|dTs\|dTs\|dGs\|dTs\|dAs\|5mCs\|dAs\|dGs\|dTs\|dTp\|dGs\|oGs\|oTs\|o5mCs\|oTs\|oG] |
| 2672 | [oTs\|oTs\|o5mCs\|oTp\|oTs\|5mCs\|dTs\|dTs\|dGs\|dTs\|dAs\|5mCs\|dAs\|dGs\|dTs\|dTs\|dGp\|oGs\|oTs\|o5mCs\|oTs\|oG] |
| 2673 | [oTs\|oTs\|o5mCs\|oTp\|oTs\|5mCs\|dTs\|dTs\|dGs\|dTs\|dAs\|5mCs\|dAs\|dGs\|dTs\|dTp\|dGs\|oGs\|oTs\|o5mCs\|oTs\|oG] |
| 2674 | [oTs\|oTs\|o5mCp\|oTs\|oTs\|5mCs\|dTs\|dTs\|dGs\|dTs\|dAs\|5mCs\|dAs\|dGs\|dTs\|dTp\|dGp\|oGs\|oTs\|o5mCs\|oTs\|oG] |
| 2675 | [oTs\|oTs\|o5mCs\|oTp\|oTs\|5mCs\|dTs\|dTs\|dGs\|dTs\|dAs\|5mCs\|dAs\|dGs\|dTs\|dTp\|dGp\|oGs\|oTs\|o5mCs\|oTs\|oG] |
| 2676 | [oTs\|oTs\|o5mCp\|oTp\|oTs\|5mCs\|dTs\|dTs\|dGs\|dTs\|dAs\|5mCs\|dAs\|dGs\|dTs\|dTs\|dGp\|oGs\|oTs\|o5mCs\|oTs\|oG] |
| 2677 | [oTs\|oTs\|o5mCp\|oTp\|oTs\|5mCs\|dTs\|dTs\|dGs\|dTs\|dAs\|5mCs\|dAs\|dGs\|dTs\|dTp\|dGs\|oGs\|oTs\|o5mCs\|oTs\|oG] |
| 2678 | [oTs\|oTs\|o5mCp\|oTp\|oTs\|5mCs\|dTs\|dTs\|dGs\|dTs\|dAs\|5mCs\|dAs\|dGs\|dTs\|dTp\|dGp\|oGs\|oTs\|o5mCs\|oTs\|oG] |
| 2679 | [o5mCs\|LTs\|oTs\|oTs\|o5mCs\|oTs\|oTs\|o5mCs\|dTs\|dTs\|dGs\|dTs\|dAs\|5mCs\|dAs\|dGs\|dTs\|dTs\|oGs\|oG] |
| 2680 | [o5mCs\|oTs\|LTs\|oTs\|o5mCs\|oTs\|oTs\|o5mCs\|dTs\|dTs\|dGs\|dTs\|dAs\|5mCs\|dAs\|dGs\|dTs\|dTs\|oGs\|oG] |
| 2681 | [o5mCs\|oTs\|oTs\|LTs\|o5mCs\|oTs\|oTs\|o5mCs\|dTs\|dTs\|dGs\|dTs\|dAs\|5mCs\|dAs\|dGs\|dTs\|dTs\|oGs\|oG] |
| 2682 | [o5mCs\|oTs\|oTs\|oTs\|L5mCs\|oTs\|oTs\|o5mCs\|dTs\|dTs\|dGs\|dTs\|dAs\|5mCs\|dAs\|dGs\|dTs\|dTs\|oGs\|oG] |
| 2683 | [o5mCs\|oTs\|oTs\|oTs\|o5mCs\|LTs\|oTs\|o5mCs\|dTs\|dTs\|dGs\|dTs\|dAs\|5mCs\|dAs\|dGs\|dTs\|dTs\|oGs\|oG] |
| 2684 | [o5mCs\|oTs\|oTs\|oTs\|o5mCs\|oTs\|LTs\|o5mCs\|dTs\|dTs\|dGs\|dTs\|dAs\|5mCs\|dAs\|dGs\|dTs\|dTs\|oGs\|oG] |
| 2685 | [o5mCs\|oTs\|dTs\|dTs\|5mCs\|dTs\|dTs\|5mCs\|dTs\|dTs\|dGs\|dTs\|oAs\|o5mCs\|oAs\|oGs\|oTs\|oTs\|LGs\|oG] |
| 2686 | [o5mCs\|oTs\|dTs\|dTs\|5mCs\|dTs\|dTs\|5mCs\|dTs\|dTs\|dGs\|dTs\|oAs\|o5mCs\|oAs\|oGs\|oTs\|LTs\|oGs\|oG] |
| 2687 | [o5mCs\|oTs\|dTs\|dTs\|5mCs\|dTs\|dTs\|5mCs\|dTs\|dTs\|dGs\|dTs\|oAs\|o5mCs\|oAs\|oGs\|LTs\|oTs\|oGs\|oG] |
| 2688 | [o5mCs\|oTs\|dTs\|dTs\|5mCs\|dTs\|dTs\|5mCs\|dTs\|dTs\|dGs\|dTs\|oAs\|o5mCs\|oAs\|LGs\|oTs\|oTs\|oGs\|oG] |
| 2689 | [o5mCs\|oTs\|dTs\|dTs\|5mCs\|dTs\|dTs\|5mCs\|dTs\|dTs\|dGs\|dTs\|oAs\|o5mCs\|LAs\|oGs\|oTs\|oTs\|oGs\|oG] |
| 2690 | [o5mCs\|oTs\|dTs\|dTs\|5mCs\|dTs\|dTs\|5mCs\|dTs\|dTs\|dGs\|dTs\|oAs\|L5mCs\|oAs\|oGs\|oTs\|oTs\|oGs\|oG] |
| 2691 | [o5mCs\|LTs\|oTs\|oTs\|o5mCs\|oTs\|oTs\|5mCs\|dTs\|dTs\|dGs\|dTs\|dAs\|5mCs\|dAs\|dGs\|dTs\|oTs\|oGs\|oG] |
| 2692 | [o5mCs\|oTs\|LTs\|oTs\|o5mCs\|oTs\|oTs\|5mCs\|dTs\|dTs\|dGs\|dTs\|dAs\|5mCs\|dAs\|dGs\|dTs\|oTs\|oGs\|oG] |
| 2693 | [o5mCs\|oTs\|oTs\|LTs\|o5mCs\|oTs\|oTs\|5mCs\|dTs\|dTs\|dGs\|dTs\|dAs\|5mCs\|dAs\|dGs\|dTs\|oTs\|oGs\|oG] |
| 2694 | [o5mCs\|oTs\|oTs\|oTs\|L5mCs\|oTs\|oTs\|5mCs\|dTs\|dTs\|dGs\|dTs\|dAs\|5mCs\|dAs\|dGs\|dTs\|oTs\|oGs\|oG] |
| 2695 | [o5mCs\|oTs\|oTs\|oTs\|o5mCs\|LTs\|oTs\|5mCs\|dTs\|dTs\|dGs\|dTs\|dAs\|5mCs\|dAs\|dGs\|dTs\|oTs\|oGs\|oG] |
| 2696 | [o5mCs\|oTs\|oTs\|dTs\|5mCs\|dTs\|dTs\|5mCs\|dTs\|dTs\|dGs\|dTs\|dAs\|o5mCs\|oAs\|oGs\|oTs\|oTs\|LGs\|oG] |
| 2697 | [o5mCs\|oTs\|oTs\|dTs\|5mCs\|dTs\|dTs\|5mCs\|dTs\|dTs\|dGs\|dTs\|dAs\|o5mCs\|oAs\|oGs\|oTs\|LTs\|oGs\|oG] |
| 2698 | [o5mCs\|oTs\|oTs\|dTs\|5mCs\|dTs\|dTs\|5mCs\|dTs\|dTs\|dGs\|dTs\|dAs\|o5mCs\|oAs\|oGs\|LTs\|oTs\|oGs\|oG] |
| 2699 | [o5mCs\|oTs\|oTs\|dTs\|5mCs\|dTs\|dTs\|5mCs\|dTs\|dTs\|dGs\|dTs\|dAs\|o5mCs\|oAs\|LGs\|oTs\|oTs\|oGs\|oG] |
| 2700 | [o5mCs\|oTs\|oTs\|dTs\|5mCs\|dTs\|dTs\|5mCs\|dTs\|dTs\|dGs\|dTs\|dAs\|o5mCs\|LAs\|oGs\|oTs\|oTs\|oGs\|oG] |
| 2701 | [o5mCs\|LTs\|oTs\|oTs\|o5mCs\|oTs\|oTs\|5mCs\|dTs\|dTs\|dGs\|dTs\|dAs\|5mCs\|dAs\|dGs\|dTs\|oTs\|oG] |
| 2702 | [o5mCs\|oTs\|LTs\|oTs\|o5mCs\|oTs\|oTs\|5mCs\|dTs\|dTs\|dGs\|dTs\|dAs\|5mCs\|dAs\|dGs\|dTs\|oTs\|oG] |
| 2703 | [o5mCs\|oTs\|oTs\|LTs\|o5mCs\|oTs\|oTs\|5mCs\|dTs\|dTs\|dGs\|dTs\|dAs\|5mCs\|dAs\|dGs\|dTs\|oTs\|oG] |
| 2704 | [o5mCs\|oTs\|oTs\|oTs\|L5mCs\|oTs\|oTs\|5mCs\|dTs\|dTs\|dGs\|dTs\|dAs\|5mCs\|dAs\|dGs\|dTs\|oTs\|oG] |
| 2705 | [o5mCs\|oTs\|oTs\|oTs\|o5mCs\|LTs\|oTs\|5mCs\|dTs\|dTs\|dGs\|dTs\|dAs\|5mCs\|dAs\|dGs\|dTs\|oTs\|oG] |
| 2706 | [oTs\|oTs\|dTs\|5mCs\|dTs\|dTs\|5mCs\|dTs\|dTs\|dGs\|dTs\|dAs\|o5mCs\|oAs\|oGs\|oTs\|oTs\|LGs\|oG] |
| 2707 | [oTs\|oTs\|dTs\|5mCs\|dTs\|dTs\|5mCs\|dTs\|dTs\|dGs\|dTs\|dAs\|o5mCs\|oAs\|oGs\|oTs\|LTs\|oGs\|oG] |
| 2708 | [oTs\|oTs\|dTs\|5mCs\|dTs\|dTs\|5mCs\|dTs\|dTs\|dGs\|dTs\|dAs\|o5mCs\|oAs\|oGs\|LTs\|oTs\|oGs\|oG] |
| 2709 | [oTs\|oTs\|dTs\|5mCs\|dTs\|dTs\|5mCs\|dTs\|dTs\|dGs\|dTs\|dAs\|o5mCs\|oAs\|LGs\|oTs\|oTs\|oGs\|oG] |
| 2710 | [oTs\|oTs\|dTs\|5mCs\|dTs\|dTs\|5mCs\|dTs\|dTs\|dGs\|dTs\|dAs\|o5mCs\|LAs\|oGs\|oTs\|oTs\|oGs\|oG] |
| 2711 | [o5mCs\|LTs\|oTs\|oTs\|o5mCs\|oTs\|dTs\|5mCs\|dTs\|dTs\|dGs\|dTs\|dAs\|5mCs\|dAs\|dGs\|oTs\|oTs\|oGs\|oG] |
| 2712 | [o5mCs\|oTs\|LTs\|oTs\|o5mCs\|oTs\|dTs\|5mCs\|dTs\|dTs\|dGs\|dTs\|dAs\|5mCs\|dAs\|dGs\|oTs\|oTs\|oGs\|oG] |
| 2713 | [o5mCs\|oTs\|oTs\|LTs\|o5mCs\|oTs\|dTs\|5mCs\|dTs\|dTs\|dGs\|dTs\|dAs\|5mCs\|dAs\|dGs\|oTs\|oTs\|oGs\|oG] |
| 2714 | [o5mCs\|oTs\|oTs\|oTs\|L5mCs\|oTs\|dTs\|5mCs\|dTs\|dTs\|dGs\|dTs\|dAs\|5mCs\|dAs\|dGs\|oTs\|oTs\|oGs\|oG] |
| 2715 | [o5mCs\|oTs\|oTs\|oTs\|5mCs\|dTs\|dTs\|5mCs\|dTs\|dTs\|dGs\|dTs\|dAs\|5mCs\|oAs\|oGs\|oTs\|oTs\|LGs\|oG] |
| 2716 | [o5mCs\|oTs\|oTs\|oTs\|5mCs\|dTs\|dTs\|5mCs\|dTs\|dTs\|dGs\|dTs\|dAs\|5mCs\|oAs\|oGs\|oTs\|LTs\|oGs\|oG] |
| 2717 | [o5mCs\|oTs\|oTs\|oTs\|5mCs\|dTs\|dTs\|5mCs\|dTs\|dTs\|dGs\|dTs\|dAs\|5mCs\|oAs\|oGs\|LTs\|oTs\|oGs\|oG] |
| 2718 | [o5mCs\|oTs\|oTs\|oTs\|5mCs\|dTs\|dTs\|5mCs\|dTs\|dTs\|dGs\|dTs\|dAs\|5mCs\|oAs\|LGs\|oTs\|oTs\|oGs\|oG] |
| 2719 | [o5mCs\|LTs\|oTs\|oTs\|o5mCs\|oTs\|dTs\|5mCs\|dTs\|dTs\|dGs\|dTs\|dAs\|5mCs\|dAs\|dGs\|oTs\|oTs\|oG] |
| 2720 | [o5mCs\|oTs\|LTs\|oTs\|o5mCs\|oTs\|dTs\|5mCs\|dTs\|dTs\|dGs\|dTs\|dAs\|5mCs\|dAs\|dGs\|oTs\|oTs\|oG] |
| 2721 | [o5mCs\|oTs\|oTs\|LTs\|o5mCs\|oTs\|dTs\|5mCs\|dTs\|dTs\|dGs\|dTs\|dAs\|5mCs\|dAs\|dGs\|oTs\|oTs\|oG] |
| 2722 | [o5mCs\|oTs\|oTs\|oTs\|L5mCs\|oTs\|dTs\|5mCs\|dTs\|dTs\|dGs\|dTs\|dAs\|5mCs\|dAs\|dGs\|oTs\|oTs\|oG] |
| 2723 | [o5mCs\|oTs\|oTs\|dTs\|5mCs\|dTs\|dTs\|5mCs\|dTs\|dTs\|dGs\|dTs\|dAs\|5mCs\|oAs\|oGs\|oTs\|oTs\|LGs\|oG] |
| 2724 | [o5mCs\|oTs\|oTs\|dTs\|5mCs\|dTs\|dTs\|5mCs\|dTs\|dTs\|dGs\|dTs\|dAs\|5mCs\|oAs\|oGs\|oTs\|LTs\|oGs\|oG] |
| 2725 | [o5mCs\|oTs\|oTs\|dTs\|5mCs\|dTs\|dTs\|5mCs\|dTs\|dTs\|dGs\|dTs\|dAs\|5mCs\|oAs\|oGs\|LTs\|oTs\|oGs\|oG] |
| 2726 | [o5mCs\|LTs\|oTs\|oTs\|o5mCs\|oTs\|dTs\|5mCs\|dTs\|dTs\|dGs\|dTs\|dAs\|5mCs\|dAs\|dGs\|oTs\|oT] |
| 2727 | [o5mCs\|oTs\|LTs\|oTs\|o5mCs\|oTs\|dTs\|5mCs\|dTs\|dTs\|dGs\|dTs\|dAs\|5mCs\|dAs\|dGs\|oTs\|oT] |
| 2728 | [o5mCs\|oTs\|oTs\|LTs\|o5mCs\|oTs\|dTs\|5mCs\|dTs\|dTs\|dGs\|dTs\|dAs\|5mCs\|dAs\|dGs\|oTs\|oT] |
| 2729 | [o5mCs\|oTs\|oTs\|oTs\|L5mCs\|oTs\|dTs\|5mCs\|dTs\|dTs\|dGs\|dTs\|dAs\|5mCs\|dAs\|dGs\|oTs\|oT] |
| 2730 | [oTs\|oTs\|5mCs\|dTs\|dTs\|5mCs\|dTs\|dTs\|dGs\|dTs\|dAs\|5mCs\|oAs\|oGs\|oTs\|oTs\|LGs\|oG] |
| 2731 | [oTs\|oTs\|5mCs\|dTs\|dTs\|5mCs\|dTs\|dTs\|dGs\|dTs\|dAs\|5mCs\|oAs\|oGs\|oTs\|LTs\|oGs\|oG] |
| 2732 | [oTs\|oTs\|5mCs\|dTs\|dTs\|5mCs\|dTs\|dTs\|dGs\|dTs\|dAs\|5mCs\|oAs\|oGs\|LTs\|oTs\|oGs\|oG] |
| 2733 | [oTs\|oTs\|5mCs\|dTs\|dTs\|5mCs\|dTs\|dTs\|dGs\|dTs\|dAs\|5mCs\|oAs\|LGs\|oTs\|oTs\|oGs\|oG] |
| 2734 | [o5mCs\|LTs\|oTs\|oTs\|o5mCs\|dTs\|dTs\|5mCs\|dTs\|dTs\|dGs\|dTs\|dAs\|5mCs\|dAs\|oGs\|oTs\|oTs\|oGs\|oG] |
| 2735 | [o5mCs\|oTs\|LTs\|oTs\|o5mCs\|dTs\|dTs\|5mCs\|dTs\|dTs\|dGs\|dTs\|dAs\|5mCs\|dAs\|oGs\|oTs\|oTs\|oGs\|oG] |
| 2736 | [o5mCs\|oTs\|oTs\|LTs\|o5mCs\|dTs\|dTs\|5mCs\|dTs\|dTs\|dGs\|dTs\|dAs\|5mCs\|dAs\|oGs\|oTs\|oTs\|oGs\|oG] |
| 2737 | [o5mCs\|oTs\|oTs\|oTs\|o5mCs\|dTs\|dTs\|5mCs\|dTs\|dTs\|dGs\|dTs\|dAs\|5mCs\|dAs\|oGs\|oTs\|oTs\|LGs\|oG] |
| 2738 | [o5mCs\|oTs\|oTs\|oTs\|o5mCs\|dTs\|dTs\|5mCs\|dTs\|dTs\|dGs\|dTs\|dAs\|5mCs\|dAs\|oGs\|oTs\|LTs\|oGs\|oG] |
| 2739 | [o5mCs\|oTs\|oTs\|oTs\|o5mCs\|dTs\|dTs\|5mCs\|dTs\|dTs\|dGs\|dTs\|dAs\|5mCs\|dAs\|oGs\|LTs\|oTs\|oGs\|oG] |
| 2740 | [o5mCs\|LTs\|oTs\|oTs\|o5mCs\|dTs\|dTs\|5mCs\|dTs\|dTs\|dGs\|dTs\|dAs\|5mCs\|dAs\|oGs\|oTs\|oTs\|oG] |
| 2741 | [o5mCs\|oTs\|LTs\|oTs\|o5mCs\|dTs\|dTs\|5mCs\|dTs\|dTs\|dGs\|dTs\|dAs\|5mCs\|dAs\|oGs\|oTs\|oTs\|oG] |
| 2742 | [o5mCs\|oTs\|oTs\|LTs\|o5mCs\|dTs\|dTs\|5mCs\|dTs\|dTs\|dGs\|dTs\|dAs\|5mCs\|dAs\|oGs\|oTs\|oTs\|oG] |
| 2743 | [oTs\|oTs\|oTs\|o5mCs\|dTs\|dTs\|5mCs\|dTs\|dTs\|dGs\|dTs\|dAs\|5mCs\|dAs\|oGs\|oTs\|oTsILGs\|oG] |
| 2744 | [oTs\|oTs\|oTs\|o5mCs\|dTs\|dTs\|5mCs\|dTs\|dTs\|dGs\|dTs\|dAs\|5mCs\|dAs\|oGs\|oTs\|LTs\|oGs\|oG] |
| 2745 | [oTs\|oTs\|oTs\|o5mCs\|dTs\|dTs\|5mCs\|dTs\|dTs\|dGs\|dTs\|dAs\|5mCs\|dAs\|oGs\|LTs\|oTs\|oGs\|oG] |
| 2746 | [o5mCs\|LTs\|oTs\|oTs\|o5mCs\|dTs\|dTs\|5mCs\|dTs\|dTs\|dGs\|dTs\|dAs\|5mCs\|dAs\|oGs\|oTs\|oT] |
| 2747 | [o5mCs\|oTs\|LTs\|oTs\|o5mCs\|dTs\|dTs\|5mCs\|dTs\|dTs\|dGs\|dTs\|dAs\|5mCs\|dAs\|oGs\|oTs\|oT] |
| 2748 | [o5mCs\|oTs\|oTs\|LTs\|o5mCs\|dTs\|dTs\|5mCs\|dTs\|dTs\|dGs\|dTs\|dAs\|5mCs\|dAs\|oGs\|oTs\|oT] |
| 2749 | [oTs\|oTs\|o5mCs\|dTs\|dTs\|5mCs\|dTs\|dTs\|dGs\|dTs\|dAs\|5mCs\|dAs\|oGs\|oTs\|oTs\|LGs\|oG] |
| 2750 | [oTs\|oTs\|o5mCs\|dTs\|dTs\|5mCs\|dTs\|dTs\|dGs\|dTs\|dAs\|5mCs\|dAs\|oGs\|oTs\|LTs\|oGs\|oG] |
| 2751 | [oTs\|oTs\|o5mCs\|dTs\|dTs\|5mCs\|dTs\|dTs\|dGs\|dTs\|dAs\|5mCs\|dAs\|oGs\|LTs\|oTs\|oGs\|oG] |
| 2752 | [o5mCs\|LTs\|oTs\|oTs\|o5mCs\|dTs\|dTs\|5mCs\|dTs\|dTs\|dGs\|dTs\|dAs\|5mCs\|dAs\|oGs\|oT] |
| 2753 | [o5mCs\|oTs\|LTs\|oTs\|o5mCs\|dTs\|dTs\|5mCs\|dTs\|dTs\|dGs\|dTs\|dAs\|5mCs\|dAs\|oGs\|oT] |
| 2754 | [o5mCs\|oTs\|oTs\|LTs\|o5mCs\|dTs\|dTs\|5mCs\|dTs\|dTs\|dGs\|dTs\|dAs\|5mCs\|dAs\|oGs\|oT] |
| 2755 | [oTs\|o5mCs\|dTs\|dTs\|5mCs\|dTs\|dTs\|dGs\|dTs\|dAs\|5mCs\|dAs\|oGs\|oTs\|oTs\|LGs\|oG] |
| 2756 | [oTs\|o5mCs\|dTs\|dTs\|5mCs\|dTs\|dTs\|dGs\|dTs\|dAs\|5mCs\|dAs\|oGs\|oTs\|LTs\|oGs\|oG] |
| 2757 | [oTs\|o5mCs\|dTs\|dTs\|5mCs\|dTs\|dTs\|dGs\|dTs\|dAs\|5mCs\|dAs\|oGs\|LTs\|oTs\|oGs\|oG] |
| 2758 | [oTs\|LTs\|oTs\|o5mCs\|dTs\|dTs\|5mCs\|dTs\|dTs\|dGs\|dTs\|dAs\|5mCs\|dAs\|oGs\|oTs\|oTs\|oGs\|oG] |
| 2759 | [oTs\|oTs\|LTs\|o5mCs\|dTs\|dTs\|5mCs\|dTs\|dTs\|dGs\|dTs\|dAs\|5mCs\|dAs\|oGs\|oTs\|oTs\|oGs\|oG] |
| 2760 | [o5mCs\|oTs\|oTs\|oTs\|o5mCs\|dTs\|dTs\|5mCs\|dTs\|dTs\|dGs\|dTs\|dAs\|5mCs\|dAs\|oGs\|oTs\|LTs\|oG] |
| 2761 | [o5mCs\|oTs\|oTs\|oTs\|o5mCs\|dTs\|dTs\|5mCs\|dTs\|dTs\|dGs\|dTs\|dAs\|5mCs\|dAs\|oGs\|LTs\|oTs\|oG] |
| 2762 | [oTs\|LTs\|oTs\|o5mCs\|dTs\|dTs\|5mCs\|dTs\|dTs\|dGs\|dTs\|dAs\|5mCs\|dAs\|oGs\|oTs\|oTs\|oG] |
| 2763 | [oTs\|oTs\|LTs\|o5mCs\|dTs\|dTs\|5mCs\|dTs\|dTs\|dGs\|dTs\|dAs\|5mCs\|dAs\|oGs\|oTs\|oTs\|oG] |
| 2764 | [oTs\|oTs\|oTs\|o5mCs\|dTs\|dTs\|5mCs\|dTs\|dTs\|dGs\|dTs\|dAs\|5mCs\|dAs\|oGs\|oTs\|LTs\|oG] |
| 2765 | [oTs\|oTs\|oTs\|o5mCs\|dTs\|dTs\|5mCs\|dTs\|dTs\|dGs\|dTs\|dAs\|5mCs\|dAs\|oGs\|LTs\|oTs\|oG] |
| 2766 | [oTs\|LTs\|oTs\|o5mCs\|dTs\|dTs\|5mCs\|dTs\|dTs\|dGs\|dTs\|dAs\|5mCs\|dAs\|oGs\|oTs\|oT] |
| 2767 | [oTs\|oTs\|LTs\|o5mCs\|dTs\|dTs\|5mCs\|dTs\|dTs\|dGs\|dTs\|dAs\|5mCs\|dAs\|oGs\|oTs\|oT] |
| 2768 | [oTs\|oTs\|oTs\|o5mCs\|dTs\|dTs\|5mCs\|dTs\|dTs\|dGs\|dTs\|dAs\|5mCs\|dAs\|oGs\|LTs\|oT] |
| 2769 | [o5mCs\|oTs\|oTs\|oTs\|o5mCs\|oTs\|oTs\|o5mCs\|dTs\|dTs\|dGs\|dTs\|dAs\|5mCs\|dAs\|dGs\|dTs\|dTs\|oGs\|oG] |
| 2770 | [o5mCs\|oTs\|dTs\|dTs\|5mCs\|dTs\|dTs\|5mCs\|dTs\|dTs\|dGs\|dTs\|oAs\|o5mCs\|oAs\|oGs\|oTs\|oTs\|oGs\|oG] |
| 2771 | [o5mCs\|oTs\|oTs\|oTs\|o5mCs\|oTs\|oTs\|5mCs\|dTs\|dTs\|dGs\|dTs\|dAs\|5mCs\|dAs\|dGs\|dTs\|oTs\|oGs\|oG] |
| 2772 | [o5mCs\|oTs\|oTs\|dTs\|5mCs\|dTs\|dTs\|5mCs\|dTs\|dTs\|dGs\|dTs\|dAs\|o5mCs\|oAs\|oGs\|oTs\|oTs\|oGs\|oG] |
| 2773 | [o5mCs\|oTs\|oTs\|oTs\|o5mCs\|oTs\|oTs\|5mCs\|dTs\|dTs\|dGs\|dTs\|dAs\|5mCs\|dAs\|dGs\|dTs\|oTs\|oG] |
| 2774 | [oTs\|oTs\|dTs\|5mCs\|dTs\|dTs\|5mCs\|dTs\|dTs\|dGs\|dTs\|dAs\|o5mCs\|oAs\|oGs\|oTs\|oTs\|oGs\|oG] |
| 2775 | [o5mCs\|oTs\|oTs\|oTs\|o5mCs\|oTs\|dTs\|5mCs\|dTs\|dTs\|dGs\|dTs\|dAs\|5mCs\|dAs\|dGs\|oTs\|oTs\|oGs\|oG] |
| 2776 | [o5mCs\|oTs\|oTs\|oTs\|5mCs\|dTs\|dTs\|5mCs\|dTs\|dTs\|dGs\|dTs\|dAs\|5mCs\|oAs\|oGs\|oTs\|oTs\|oGs\|oG] |
| 2777 | [o5mCs\|oTs\|oTs\|oTs\|o5mCs\|oTs\|dTs\|5mCs\|dTs\|dTs\|dGs\|dTs\|dAs\|5mCs\|dAs\|dGs\|oTs\|oTs\|oG] |
| 2778 | [o5mCs\|oTs\|oTs\|dTs\|5mCs\|dTs\|dTs\|5mCs\|dTs\|dTs\|dGs\|dTs\|dAs\|5mCs\|oAs\|oGs\|oTs\|oTs\|oGs\|oG] |
| 2779 | [o5mCs\|oTs\|oTs\|oTs\|o5mCs\|oTs\|dTs\|5mCs\|dTs\|dTs\|dGs\|dTs\|dAs\|5mCs\|dAs\|dGs\|oTs\|oT] |
| 2780 | [oTs\|oTs\|5mCs\|dTs\|dTs\|5mCs\|dTs\|dTs\|dGs\|dTs\|dAs\|5mCs\|oAs\|oGs\|oTs\|oTs\|oGs\|oG] |
| 2781 | [o5mCs\|oTs\|oTs\|oTs\|o5mCs\|dTs\|dTs\|5mCs\|dTs\|dTs\|dGs\|dTs\|dAs\|5mCs\|dAs\|oGs\|oTs\|oTs\|oGs\|oG] |
| 2782 | [o5mCs\|oTs\|oTs\|oTs\|o5mCs\|dTs\|dTs\|5mCs\|dTs\|dTs\|dGs\|dTs\|dAs\|5mCs\|dAs\|oGs\|oTs\|oTs\|oG] |
| 2783 | [o5mCs\|oTs\|oTs\|oTs\|o5mCs\|dTs\|dTs\|5mCs\|dTs\|dTs\|dGs\|dTs\|dAs\|5mCs\|dAs\|oGs\|oTs\|oT] |
| 2784 | [oTs\|oTs\|o5mCs\|dTs\|dTs\|5mCs\|dTs\|dTs\|dGs\|dTs\|dAs\|5mCs\|dAs\|oGs\|oTs\|oTs\|oGs\|oG] |
| 2785 | [o5mCs\|oTs\|oTs\|oTs\|o5mCs\|dTs\|dTs\|5mCs\|dTs\|dTs\|dGs\|dTs\|dAs\|5mCs\|dAs\|oGs\|oT] |
| 2786 | [oTs\|o5mCs\|dTs\|dTs\|5mCs\|dTs\|dTs\|dGs\|dTs\|dAs\|5mCs\|dAs\|oGs\|oTs\|oTs\|oGs\|oG] |
| 2787 | [oTs\|oTs\|oTs\|o5mCs\|dTs\|dTs\|5mCs\|dTs\|dTs\|dGs\|dTs\|dAs\|5mCs\|dAs\|oGs\|oTs\|oTs\|oGs\|oG] |
| 2788 | [oTs\|oTs\|oTs\|o5mCs\|dTs\|dTs\|5mCs\|dTs\|dTs\|dGs\|dTs\|dAs\|5mCs\|dAs\|oGs\|oTs\|oTs\|oG] |
| 2789 | [oTs\|oTs\|oTs\|o5mCs\|dTs\|dTs\|5mCs\|dTs\|dTs\|dGs\|dTs\|dAs\|5mCs\|dAs\|oGs\|oTs\|oT] |
| 2790 | [o5mCs\|oTs\|oTp\|oTs\|o5mCs\|dTs\|dTs\|5mCs\|dTs\|dTs\|dGs\|dTs\|dAs\|5mCs\|dAs\|oGs\|oTs\|oTs\|oGs\|oG] |
| 2791 | [o5mCs\|oTs\|oTs\|oTp\|o5mCs\|dTs\|dTs\|5mCs\|dTs\|dTs\|dGs\|dTs\|dAs\|5mCs\|dAs\|oGs\|oTs\|oTs\|oGs\|oG] |
| 2792 | [o5mCs\|oTs\|oTp\|oTp\|o5mCs\|dTs\|dTs\|5mCs\|dTs\|dTs\|dGs\|dTs\|dAs\|5mCs\|dAs\|oGs\|oTs\|oTs\|oGs\|oG] |
| 2793 | [o5mCs\|oTs\|oTs\|oTs\|o5mCs\|dTs\|dTs\|5mCs\|dTs\|dTs\|dGs\|dTs\|dAs\|5mCs\|dAs\|oGs\|oTp\|oTs\|oGs\|oG] |
| 2794 | [o5mCs\|oTs\|oTs\|oTs\|o5mCs\|dTs\|dTs\|5mCs\|dTs\|dTs\|dGs\|dTs\|dAs\|5mCs\|dAs\|oGp\|oTs\|oTs\|oGs\|oG] |
| 2795 | [o5mCs\|oTs\|oTs\|oTs\|o5mCs\|dTs\|dTs\|5mCs\|dTs\|dTs\|dGs\|dTs\|dAs\|5mCs\|dAs\|oGp\|oTp\|oTs\|oGs\|oG] |
| 2796 | [o5mCs\|oTs\|oTp\|oTs\|o5mCs\|dTs\|dTs\|5mCs\|dTs\|dTs\|dGs\|dTs\|dAs\|5mCs\|dAs\|oGs\|oTp\|oTs\|oGs\|oG] |
| 2797 | [o5mCs\|oTs\|oTp\|oTs\|o5mCs\|dTs\|dTs\|5mCs\|dTs\|dTs\|dGs\|dTs\|dAs\|5mCs\|dAs\|oGp\|oTs\|oTs\|oGs\|oG] |
| 2798 | [o5mCs\|oTs\|oTs\|oTp\|o5mCs\|dTs\|dTs\|5mCs\|dTs\|dTs\|dGs\|dTs\|dAs\|5mCs\|dAs\|oGs\|oTp\|oTs\|oGs\|oG] |
| 2799 | [o5mCs\|oTs\|oTs\|oTp\|o5mCs\|dTs\|dTs\|5mCs\|dTs\|dTs\|dGs\|dTs\|dAs\|5mCs\|dAs\|oGp\|oTs\|oTs\|oGs\|oG] |
| 2800 | [o5mCs\|oTs\|oTp\|oTs\|o5mCs\|dTs\|dTs\|5mCs\|dTs\|dTs\|dGs\|dTs\|dAs\|5mCs\|dAs\|oGp\|oTp\|oTs\|oGs\|oG] |
| 2801 | [o5mCs\|oTs\|oTs\|oTp\|o5mCs\|dTs\|dTs\|5mCs\|dTs\|dTs\|dGs\|dTs\|dAs\|5mCs\|dAs\|oGp\|oTp\|oTs\|oGs\|oG] |
| 2802 | [o5mCs\|oTs\|oTp\|oTp\|o5mCs\|dTs\|dTs\|5mCs\|dTs\|dTs\|dGs\|dTs\|dAs\|5mCs\|dAs\|oGs\|oTp\|oTs\|oGs\|oG] |
| 2803 | [o5mCs\|oTs\|oTp\|oTp\|o5mCs\|dTs\|dTs\|5mCs\|dTs\|dTs\|dGs\|dTs\|dAs\|5mCs\|dAs\|oGp\|oTs\|oTs\|oGs\|oG] |
| 2804 | [o5mCs\|oTs\|oTp\|oTp\|o5mCs\|dTs\|dTs\|5mCs\|dTs\|dTs\|dGs\|dTs\|dAs\|5mCs\|dAs\|oGp\|oTp\|oTs\|oGs\|oG] |
| 2805 | [o5mCs\|oTs\|oTs\|oTs\|o5mCs\|dTs\|dTs\|5mCs\|dTs\|dTs\|dGs\|dTs\|dAs\|5mCs\|dAs\|oGs\|oTs\|oTs\|oGs\|oGs\|oT] |
| 2806 | [o5mCs\|oTs\|oTp\|oTs\|o5mCs\|dTs\|dTs\|5mCs\|dTs\|dTs\|dGs\|dTs\|dAs\|5mCs\|dAs\|oGs\|oTs\|oTs\|oGs\|oGs\|oT] |
| 2807 | [o5mCs\|oTs\|oTs\|oTp\|o5mCs\|dTs\|dTs\|5mCs\|dTs\|dTs\|dGs\|dTs\|dAs\|5mCs\|dAs\|oGs\|oTs\|oTs\|oGs\|oGs\|oT] |
| 2808 | [o5mCs\|oTs\|oTp\|oTp\|o5mCs\|dTs\|dTs\|5mCs\|dTs\|dTs\|dGs\|dTs\|dAs\|5mCs\|dAs\|oGs\|oTs\|oTs\|oGs\|oGs\|oT] |
| 2809 | [o5mCs\|oTs\|oTs\|oTs\|o5mCs\|dTs\|dTs\|5mCs\|dTs\|dTs\|dGs\|dTs\|dAs\|5mCs\|dAs\|oGs\|oTp\|oTs\|oGs\|oGs\|oT] |
| 2810 | [o5mCs\|oTs\|oTs\|oTs\|o5mCs\|dTs\|dTs\|5mCs\|dTs\|dTs\|dGs\|dTs\|dAs\|5mCs\|dAs\|oGp\|oTs\|oTs\|oGs\|oGs\|oT] |
| 2811 | [o5mCs\|oTs\|oTs\|oTs\|o5mCs\|dTs\|dTs\|5mCs\|dTs\|dTs\|dGs\|dTs\|dAs\|5mCs\|dAs\|oGp\|oTp\|oTs\|oGs\|oGs\|oT] |
| 2812 | [o5mCs\|oTs\|oTp\|oTs\|o5mCs\|dTs\|dTs\|5mCs\|dTs\|dTs\|dGs\|dTs\|dAs\|5mCs\|dAs\|oGs\|oTp\|oTs\|oGs\|oGs\|oT] |
| 2813 | [o5mCs\|oTs\|oTp\|oTs\|o5mCs\|dTs\|dTs\|5mCs\|dTs\|dTs\|dGs\|dTs\|dAs\|5mCs\|dAs\|oGp\|oTs\|oTs\|oGs\|oGs\|oT] |
| 2814 | [o5mCs\|oTs\|oTs\|oTp\|o5mCs\|dTs\|dTs\|5mCs\|dTs\|dTs\|dGs\|dTs\|dAs\|5mCs\|dAs\|oGs\|oTp\|oTs\|oGs\|oGs\|oT] |
| 2815 | [o5mCs\|oTs\|oTs\|oTp\|o5mCs\|dTs\|dTs\|5mCs\|dTs\|dTs\|dGs\|dTs\|dAs\|5mCs\|dAs\|oGp\|oTs\|oTs\|oGs\|oGs\|oT] |
| 2816 | [o5mCs\|oTs\|oTp\|oTs\|o5mCs\|dTs\|dTs\|5mCs\|dTs\|dTs\|dGs\|dTs\|dAs\|5mCs\|dAs\|oGp\|oTp\|oTs\|oGs\|oGs\|oT] |
| 2817 | [o5mCs\|oTs\|oTs\|oTp\|o5mCs\|dTs\|dTs\|5mCs\|dTs\|dTs\|dGs\|dTs\|dAs\|5mCs\|dAs\|oGp\|oTp\|oTs\|oGs\|oGs\|oT] |
| 2818 | [o5mCs\|oTs\|oTp\|oTp\|o5mCs\|dTs\|dTs\|5mCs\|dTs\|dTs\|dGs\|dTs\|dAs\|5mCs\|dAs\|oGs\|oTp\|oTs\|oGs\|oGs\|oT] |
| 2819 | [o5mCs\|oTs\|oTp\|oTp\|o5mCs\|dTs\|dTs\|5mCs\|dTs\|dTs\|dGs\|dTs\|dAs\|5mCs\|dAs\|oGp\|oTs\|oTs\|oGs\|oGs\|oT] |
| 2820 | [o5mCs\|oTs\|oTp\|oTp\|o5mCs\|dTs\|dTs\|5mCs\|dTs\|dTs\|dGs\|dTs\|dAs\|5mCs\|dAs\|oGp\|oTp\|oTs\|oGs\|oGs\|oT] |
| 2821 | [o5mCs\|oTs\|oTs\|oTs\|o5mCs\|dTs\|dTs\|5mCs\|dTs\|dTs\|dGs\|dTs\|dAs\|5mCs\|dAs\|oGs\|oTs\|oTs\|oGs\|oGs\|oTs\|o5mC] |
| 2822 | [o5mCs\|oTs\|oTp\|oTs\|o5mCs\|dTs\|dTs\|5mCs\|dTs\|dTs\|dGs\|dTs\|dAs\|5mCs\|dAs\|oGs\|oTs\|oTs\|oGs\|oGs\|oTs\|o5mC] |
| 2823 | [o5mCs\|oTs\|oTs\|oTp\|o5mCs\|dTs\|dTs\|5mCs\|dTs\|dTs\|dGs\|dTs\|dAs\|5mCs\|dAs\|oGs\|oTs\|oTs\|oGs\|oGs\|oTs\|o5mC] |
| 2824 | [o5mCs\|oTs\|oTp\|oTp\|o5mCs\|dTs\|dTs\|5mCs\|dTs\|dTs\|dGs\|dTs\|dAs\|5mCs\|dAs\|oGs\|oTs\|oTs\|oGs\|oGs\|oTs\|o5mC] |
| 2825 | [o5mCs\|oTs\|oTs\|oTs\|o5mCs\|dTs\|dTs\|5mCs\|dTs\|dTs\|dGs\|dTs\|dAs\|5mCs\|dAs\|oGs\|oTp\|oTs\|oGs\|oGs\|oTs\|o5mC] |
| 2826 | [o5mCs\|oTs\|oTs\|oTs\|o5mCs\|dTs\|dTs\|5mCs\|dTs\|dTs\|dGs\|dTs\|dAs\|5mCs\|dAs\|oGp\|oTs\|oTs\|oGs\|oGs\|oTs\|o5mC] |
| 2827 | [o5mCs\|oTs\|oTs\|oTs\|o5mCs\|dTs\|dTs\|5mCs\|dTs\|dTs\|dGs\|dTs\|dAs\|5mCs\|dAs\|oGp\|oTp\|oTs\|oGs\|oGs\|oTs\|o5mC] |
| 2828 | [o5mCs\|oTs\|oTp\|oTs\|o5mCs\|dTs\|dTs\|5mCs\|dTs\|dTs\|dGs\|dTs\|dAs\|5mCs\|dAs\|oGs\|oTp\|oTs\|oGs\|oGs\|oTs\|o5mC] |
| 2829 | [o5mCs\|oTs\|oTp\|oTs\|o5mCs\|dTs\|dTs\|5mCs\|dTs\|dTs\|dGs\|dTs\|dAs\|5mCs\|dAs\|oGp\|oTs\|oTs\|oGs\|oGs\|oTs\|o5mC] |
| 2830 | [o5mCs\|oTs\|oTs\|oTp\|o5mCs\|dTs\|dTs\|5mCs\|dTs\|dTs\|dGs\|dTs\|dAs\|5mCs\|dAs\|oGs\|oTp\|oTs\|oGs\|oGs\|oTs\|o5mC] |
| 2831 | [o5mCs\|oTs\|oTs\|oTp\|o5mCs\|dTs\|dTs\|5mCs\|dTs\|dTs\|dGs\|dTs\|dAs\|5mCs\|dAs\|oGp\|oTs\|oTs\|oGs\|oGs\|oTs\|o5mC] |
| 2832 | [o5mCs\|oTs\|oTp\|oTs\|o5mCs\|dTs\|dTs\|5mCs\|dTs\|dTs\|dGs\|dTs\|dAs\|5mCs\|dAs\|oGp\|oTp\|oTs\|oGs\|oGs\|oTs\|o5mC] |
| 2833 | [o5mCs\|oTs\|oTs\|oTp\|o5mCs\|dTs\|dTs\|5mCs\|dTs\|dTs\|dGs\|dTs\|dAs\|5mCs\|dAs\|oGp\|oTp\|oTs\|oGs\|oGs\|oTs\|o5mC] |
| 2834 | [o5mCs\|oTs\|oTp\|oTp\|o5mCs\|dTs\|dTs\|5mCs\|dTs\|dTs\|dGs\|dTs\|dAs\|5mCs\|dAs\|oGs\|oTp\|oTs\|oGs\|oGs\|oTs\|o5mC] |
| 2835 | [o5mCs\|oTs\|oTp\|oTp\|o5mCs\|dTs\|dTs\|5mCs\|dTs\|dTs\|dGs\|dTs\|dAs\|5mCs\|dAs\|oGp\|oTs\|oTs\|oGs\|oGs\|oTs\|o5mC] |
| 2836 | [o5mCs\|oTs\|oTp\|oTp\|o5mCs\|dTs\|dTs\|5mCs\|dTs\|dTs\|dGs\|dTs\|dAs\|5mCs\|dAs\|oGp\|oTp\|oTs\|oGs\|oGs\|oTs\|o5mC] |
| 2837 | [o5mCs\|oTs\|oTs\|oTs\|o5mCs\|dTs\|dTs\|5mCs\|dTs\|dTs\|dGs\|dTs\|dAs\|5mCs\|dAs\|oGs\|oTs\|oTs\|oGs\|oGs\|oTs\|o5mCs\|oT] |
| 2838 | [o5mCs\|oTs\|oTp\|oTs\|o5mCs\|dTs\|dTs\|5mCs\|dTs\|dTs\|dGs\|dTs\|dAs\|5mCs\|dAs\|oGs\|oTs\|oTs\|oGs\|oGs\|oTs\|o5mCs\|oT] |
| 2839 | [o5mCs\|oTs\|oTs\|oTp\|o5mCs\|dTs\|dTs\|5mCs\|dTs\|dTs\|dGs\|dTs\|dAs\|5mCs\|dAs\|oGs\|oTs\|oTs\|oGs\|oGs\|oTs\|o5mCs\|oT] |
| 2840 | [o5mCs\|oTs\|oTp\|oTp\|o5mCs\|dTs\|dTs\|5mCs\|dTs\|dTs\|dGs\|dTs\|dAs\|5mCs\|dAs\|oGs\|oTs\|oTs\|oGs\|oGs\|oTs\|o5mCs\|oT] |
| 2841 | [o5mCs\|oTs\|oTs\|oTs\|o5mCs\|dTs\|dTs\|5mCs\|dTs\|dTs\|dGs\|dTs\|dAs\|5mCs\|dAs\|oGs\|oTp\|oTs\|oGs\|oGs\|oTs\|o5mCs\|oT] |
| 2842 | [o5mCs\|oTs\|oTs\|oTs\|o5mCs\|dTs\|dTs\|5mCs\|dTs\|dTs\|dGs\|dTs\|dAs\|5mCs\|dAs\|oGp\|oTs\|oTs\|oGs\|oGs\|oTs\|o5mCs\|oT] |
| 2843 | [o5mCs\|oTs\|oTs\|oTs\|o5mCs\|dTs\|dTs\|5mCs\|dTs\|dTs\|dGs\|dTs\|dAs\|5mCs\|dAs\|oGp\|oTp\|oTs\|oGs\|oGs\|oTs\|o5mCs\|oT] |
| 2844 | [o5mCs\|oTs\|oTp\|oTs\|o5mCs\|dTs\|dTs\|5mCs\|dTs\|dTs\|dGs\|dTs\|dAs\|5mCs\|dAs\|oGs\|oTp\|oTs\|oGs\|oGs\|oTs\|o5mCs\|oT] |
| 2845 | [o5mCs\|oTs\|oTp\|oTs\|o5mCs\|dTs\|dTs\|5mCs\|dTs\|dTs\|dGs\|dTs\|dAs\|5mCs\|dAs\|oGp\|oTs\|oTs\|oGs\|oGs\|oTs\|o5mCs\|oT] |
| 2846 | [o5mCs\|oTs\|oTs\|oTp\|o5mCs\|dTs\|dTs\|5mCs\|dTs\|dTs\|dGs\|dTs\|dAs\|5mCs\|dAs\|oGs\|oTp\|oTs\|oGs\|oGs\|oTs\|o5mCs\|oT] |
| 2847 | [o5mCs\|oTs\|oTs\|oTp\|o5mCs\|dTs\|dTs\|5mCs\|dTs\|dTs\|dGs\|dTs\|dAs\|5mCs\|dAs\|oGp\|oTs\|oTs\|oGs\|oGs\|oTs\|o5mCs\|oT] |
| 2848 | [o5mCs\|oTs\|oTp\|oTs\|o5mCs\|dTs\|dTs\|5mCs\|dTs\|dTs\|dGs\|dTs\|dAs\|5mCs\|dAs\|oGp\|oTp\|oTs\|oGs\|oGs\|oTs\|o5mCs\|oT] |
| 2849 | [o5mCs\|oTs\|oTs\|oTp\|o5mCs\|dTs\|dTs\|5mCs\|dTs\|dTs\|dGs\|dTs\|dAs\|5mCs\|dAs\|oGp\|oTp\|oTs\|oGs\|oGs\|oTs\|o5mCs\|oT] |
| 2850 | [o5mCs\|oTs\|oTp\|oTp\|o5mCs\|dTs\|dTs\|5mCs\|dTs\|dTs\|dGs\|dTs\|dAs\|5mCs\|dAs\|oGs\|oTp\|oTs\|oGs\|oGs\|oTs\|o5mCs\|oT] |
| 2851 | [o5mCs\|oTs\|oTp\|oTp\|o5mCs\|dTs\|dTs\|5mCs\|dTs\|dTs\|dGs\|dTs\|dAs\|5mCs\|dAs\|oGp\|oTs\|oTs\|oGs\|oGs\|oTs\|o5mCs\|oT] |
| 2852 | [o5mCs\|oTs\|oTp\|oTp\|o5mCs\|dTs\|dTs\|5mCs\|dTs\|dTs\|dGs\|dTs\|dAs\|5mCs\|dAs\|oGp\|oTp\|oTs\|oGs\|oGs\|oTs\|o5mCs\|oT] |
| 2853 | [o5mCs\|oTs\|oTs\|oTs\|o5mCs\|dTs\|dTs\|5mCs\|dTs\|dTs\|dGs\|dTs\|dAs\|5mCs\|dAs\|dGs\|oTs\|oTs\|oGs\|oGs\|oT] |
| 2854 | [o5mCs\|oTs\|oTp\|oTs\|o5mCs\|dTs\|dTs\|5mCs\|dTs\|dTs\|dGs\|dTs\|dAs\|5mCs\|dAs\|dGs\|oTs\|oTs\|oGs\|oGs\|oT] |
| 2855 | [o5mCs\|oTs\|oTs\|oTp\|o5mCs\|dTs\|dTs\|5mCs\|dTs\|dTs\|dGs\|dTs\|dAs\|5mCs\|dAs\|dGs\|oTs\|oTs\|oGs\|oGs\|oT] |
| 2856 | [o5mCs\|oTs\|oTp\|oTp\|o5mCs\|dTs\|dTs\|5mCs\|dTs\|dTs\|dGs\|dTs\|dAs\|5mCs\|dAs\|dGs\|oTs\|oTs\|oGs\|oGs\|oT] |
| 2857 | [o5mCs\|oTs\|oTs\|oTs\|o5mCs\|dTs\|dTs\|5mCs\|dTs\|dTs\|dGs\|dTs\|dAs\|5mCs\|dAs\|dGs\|oTp\|oTs\|oGs\|oGs\|oT] |
| 2858 | [o5mCs\|oTs\|oTs\|oTs\|o5mCs\|dTs\|dTs\|5mCs\|dTs\|dTs\|dGs\|dTs\|dAs\|5mCs\|dAs\|dGp\|oTs\|oTs\|oGs\|oGs\|oT] |
| 2859 | [o5mCs\|oTs\|oTs\|oTs\|o5mCs\|dTs\|dTs\|5mCs\|dTs\|dTs\|dGs\|dTs\|dAs\|5mCs\|dAs\|dGp\|oTp\|oTs\|oGs\|oGs\|oT] |
| 2860 | [o5mCs\|oTs\|oTp\|oTs\|o5mCs\|dTs\|dTs\|5mCs\|dTs\|dTs\|dGs\|dTs\|dAs\|5mCs\|dAs\|dGs\|oTp\|oTs\|oGs\|oGs\|oT] |
| 2861 | [o5mCs\|oTs\|oTp\|oTs\|o5mCs\|dTs\|dTs\|5mCs\|dTs\|dTs\|dGs\|dTs\|dAs\|5mCs\|dAs\|dGp\|oTs\|oTs\|oGs\|oGs\|oT] |
| 2862 | [o5mCs\|oTs\|oTs\|oTp\|o5mCs\|dTs\|dTs\|5mCs\|dTs\|dTs\|dGs\|dTs\|dAs\|5mCs\|dAs\|dGs\|oTp\|oTs\|oGs\|oGs\|oT] |
| 2863 | [o5mCs\|oTs\|oTs\|oTp\|o5mCs\|dTs\|dTs\|5mCs\|dTs\|dTs\|dGs\|dTs\|dAs\|5mCs\|dAs\|dGp\|oTs\|oTs\|oGs\|oGs\|oT] |
| 2864 | [o5mCs\|oTs\|oTp\|oTs\|o5mCs\|dTs\|dTs\|5mCs\|dTs\|dTs\|dGs\|dTs\|dAs\|5mCs\|dAs\|dGp\|oTp\|oTs\|oGs\|oGs\|oT] |
| 2865 | [o5mCs\|oTs\|oTs\|oTp\|o5mCs\|dTs\|dTs\|5mCs\|dTs\|dTs\|dGs\|dTs\|dAs\|5mCs\|dAs\|dGp\|oTp\|oTs\|oGs\|oGs\|oT] |
| 2866 | [o5mCs\|oTs\|oTp\|oTp\|o5mCs\|dTs\|dTs\|5mCs\|dTs\|dTs\|dGs\|dTs\|dAs\|5mCs\|dAs\|dGs\|oTp\|oTs\|oGs\|oGs\|oT] |
| 2867 | [o5mCs\|oTs\|oTp\|oTp\|o5mCs\|dTs\|dTs\|5mCs\|dTs\|dTs\|dGs\|dTs\|dAs\|5mCs\|dAs\|dGp\|oTs\|oTs\|oGs\|oGs\|oT] |
| 2868 | [o5mCs\|oTs\|oTp\|oTp\|o5mCs\|dTs\|dTs\|5mCs\|dTs\|dTs\|dGs\|dTs\|dAs\|5mCs\|dAs\|dGp\|oTp\|oTs\|oGs\|oGs\|oT] |
| 2869 | [o5mCs\|oTs\|oTs\|oTs\|o5mCs\|dTs\|dTs\|5mCs\|dTs\|dTs\|dGs\|dTs\|dAs\|5mCs\|dAs\|dGs\|dTs\|oTs\|oGs\|oGs\|oTs\|o5mC] |
| 2870 | [o5mCs\|oTs\|oTp\|oTs\|o5mCs\|dTs\|dTs\|5mCs\|dTs\|dTs\|dGs\|dTs\|dAs\|5mCs\|dAs\|dGs\|dTs\|oTs\|oGs\|oGs\|oTs\|o5mC] |
| 2871 | [o5mCs\|oTs\|oTs\|oTp\|o5mCs\|dTs\|dTs\|5mCs\|dTs\|dTs\|dGs\|dTs\|dAs\|5mCs\|dAs\|dGs\|dTs\|oTs\|oGs\|oGs\|oTs\|o5mC] |
| 2872 | [o5mCs\|oTs\|oTp\|oTp\|o5mCs\|dTs\|dTs\|5mCs\|dTs\|dTs\|dGs\|dTs\|dAs\|5mCs\|dAs\|dGs\|dTs\|oTs\|oGs\|oGs\|oTs\|o5mC] |
| 2873 | [o5mCs\|oTs\|oTs\|oTs\|o5mCs\|dTs\|dTs\|5mCs\|dTs\|dTs\|dGs\|dTs\|dAs\|5mCs\|dAs\|dGs\|dTp\|oTs\|oGs\|oGs\|oTs\|o5mC] |
| 2874 | [o5mCs\|oTs\|oTs\|oTs\|o5mCs\|dTs\|dTs\|5mCs\|dTs\|dTs\|dGs\|dTs\|dAs\|5mCs\|dAs\|dGp\|dTs\|oTs\|oGs\|oGs\|oTs\|o5mC] |
| 2875 | [o5mCs\|oTs\|oTs\|oTs\|o5mCs\|dTs\|dTs\|5mCs\|dTs\|dTs\|dGs\|dTs\|dAs\|5mCs\|dAs\|dGp\|dTp\|oTs\|oGs\|oGs\|oTs\|o5mC] |
| 2876 | [o5mCs\|oTs\|oTp\|oTs\|o5mCs\|dTs\|dTs\|5mCs\|dTs\|dTs\|dGs\|dTs\|dAs\|5mCs\|dAs\|dGs\|dTp\|oTs\|oGs\|oGs\|oTs\|o5mC] |
| 2877 | [o5mCs\|oTs\|oTp\|oTs\|o5mCs\|dTs\|dTs\|5mCs\|dTs\|dTs\|dGs\|dTs\|dAs\|5mCs\|dAs\|dGp\|dTs\|oTs\|oGs\|oGs\|oTs\|o5mC] |
| 2878 | [o5mCs\|oTs\|oTs\|oTp\|o5mCs\|dTs\|dTs\|5mCs\|dTs\|dTs\|dGs\|dTs\|dAs\|5mCs\|dAs\|dGs\|dTp\|oTs\|oGs\|oGs\|oTs\|o5mC] |
| 2879 | [o5mCs\|oTs\|oTs\|oTp\|o5mCs\|dTs\|dTs\|5mCs\|dTs\|dTs\|dGs\|dTs\|dAs\|5mCs\|dAs\|dGp\|dTs\|oTs\|oGs\|oGs\|oTs\|o5mC] |
| 2880 | [o5mCs\|oTs\|oTp\|oTs\|o5mCs\|dTs\|dTs\|5mCs\|dTs\|dTs\|dGs\|dTs\|dAs\|5mCs\|dAs\|dGp\|dTp\|oTs\|oGs\|oGs\|oTs\|o5mC] |
| 2881 | [o5mCs\|oTs\|oTs\|oTp\|o5mCs\|dTs\|dTs\|5mCs\|dTs\|dTs\|dGs\|dTs\|dAs\|5mCs\|dAs\|dGp\|dTp\|oTs\|oGs\|oGs\|oTs\|o5mC] |
| 2882 | [o5mCs\|oTs\|oTp\|oTp\|o5mCs\|dTs\|dTs\|5mCs\|dTs\|dTs\|dGs\|dTs\|dAs\|5mCs\|dAs\|dGs\|dTp\|oTs\|oGs\|oGs\|oTs\|o5mC] |
| 2883 | [o5mCs\|oTs\|oTp\|oTp\|o5mCs\|dTs\|dTs\|5mCs\|dTs\|dTs\|dGs\|dTs\|dAs\|5mCs\|dAs\|dGp\|dTs\|oTs\|oGs\|oGs\|oTs\|o5mC] |
| 2884 | [o5mCs\|oTs\|oTp\|oTp\|o5mCs\|dTs\|dTs\|5mCs\|dTs\|dTs\|dGs\|dTs\|dAs\|5mCs\|dAs\|dGp\|dTp\|oTs\|oGs\|oGs\|oTs\|o5mC] |
| 2885 | [oTs\|LGs\|oAs\|oTs\|o5mCs\|o5mCs\|oTs\|oGs\|dTs\|dTs\|5mCs\|dTs\|5mCs\|5mCs\|5mCs\|dAs\|dGs\|5mCs\|oAs\|oA] |
| 2886 | [oTs\|oGs\|LAs\|oTs\|o5mCs\|o5mCs\|oTs\|oGs\|dTs\|dTs\|5mCs\|dTs\|5mCs\|5mCs\|5mCs\|dAs\|dGs\|5mCs\|oAs\|oA] |
| 2887 | [oTs\|oGs\|oAs\|LTs\|o5mCs\|o5mCs\|oTs\|oGs\|dTs\|dTs\|5mCs\|dTs\|5mCs\|5mCs\|5mCs\|dAs\|dGs\|5mCs\|oAs\|oA] |
| 2888 | [oTs\|oGs\|oAs\|oTs\|L5mCs\|o5mCs\|oTs\|oGs\|dTs\|dTs\|5mCs\|dTs\|5mCs\|5mCs\|5mCs\|dAs\|dGs\|5mCs\|oAs\|oA] |
| 2889 | [oTs\|oGs\|oAs\|oTs\|o5mCs\|L5mCs\|oTs\|oGs\|dTs\|dTs\|5mCs\|dTs\|5mCs\|5mCs\|5mCs\|dAs\|dGs\|5mCs\|oAs\|oA] |
| 2890 | [oTs\|oGs\|oAs\|oTs\|o5mCs\|o5mCs\|LTs\|oGs\|dTs\|dTs\|5mCs\|dTs\|5mCs\|5mCs\|5mCs\|dAs\|dGs\|5mCs\|oAs\|oA] |
| 2891 | [oTs\|oGs\|dAs\|dTs\|5mCs\|5mCs\|dTs\|dGs\|dTs\|dTs\|5mCs\|dTs\|o5mCs\|o5mCs\|o5mCs\|oAs\|oGs\|o5mCs\|LAs\|oA] |
| 2892 | [oTs\|oGs\|dAs\|dTs\|5mCs\|5mCs\|dTs\|dGs\|dTs\|dTs\|5mCs\|dTs\|o5mCs\|o5mCs\|o5mCs\|oAs\|oGs\|L5mCs\|oAs\|oA] |
| 2893 | [oTs\|oGs\|dAs\|dTs\|5mCs\|5mCs\|dTs\|dGs\|dTs\|dTs\|5mCs\|dTs\|o5mCs\|o5mCs\|o5mCs\|oAs\|LGs\|o5mCs\|oAs\|oA] |
| 2894 | [oTs\|oGs\|dAs\|dTs\|5mCs\|5mCs\|dTs\|dGs\|dTs\|dTs\|5mCs\|dTs\|o5mCs\|o5mCs\|o5mCs\|LAs\|oGs\|o5mCs\|oAs\|oA] |
| 2895 | [oTs\|oGs\|dAs\|dTs\|5mCs\|5mCs\|dTs\|dGs\|dTs\|dTs\|5mCs\|dTs\|o5mCs\|o5mCs\|L5mCs\|oAs\|oGs\|o5mCs\|oAs\|oA] |
| 2896 | [oTs\|oGs\|dAs\|dTs\|5mCs\|5mCs\|dTs\|dGs\|dTs\|dTs\|5mCs\|dTs\|o5mCs\|L5mCs\|o5mCs\|oAs\|oGs\|o5mCs\|oAs\|oA] |
| 2897 | [oTs\|LGs\|oAs\|oTs\|o5mCs\|o5mCs\|oTs\|dGs\|dTs\|dTs\|5mCs\|dTs\|5mCs\|5mCs\|5mCs\|dAs\|dGs\|o5mCs\|oAs\|oA] |
| 2898 | [oTs\|oGs\|LAs\|oTs\|o5mCs\|o5mCs\|oTs\|dGs\|dTs\|dTs\|5mCs\|dTs\|5mCs\|5mCs\|5mCs\|dAs\|dGs\|o5mCs\|oAs\|oA] |
| 2899 | [oTs\|oGs\|oAs\|LTs\|o5mCs\|o5mCs\|oTs\|dGs\|dTs\|dTs\|5mCs\|dTs\|5mCs\|5mCs\|5mCs\|dAs\|dGs\|o5mCs\|oAs\|oA] |
| 2900 | [oTs\|oGs\|oAs\|oTs\|L5mCs\|o5mCs\|oTs\|dGs\|dTs\|dTs\|5mCs\|dTs\|5mCs\|5mCs\|5mCs\|dAs\|dGs\|o5mCs\|oAs\|oA] |
| 2901 | [oTs\|oGs\|oAs\|oTs\|o5mCs\|L5mCs\|oTs\|dGs\|dTs\|dTs\|5mCs\|dTs\|5mCs\|5mCs\|5mCs\|dAs\|dGs\|o5mCs\|oAs\|oA] |
| 2902 | [oTs\|oGs\|oAs\|dTs\|5mCs\|5mCs\|dTs\|dGs\|dTs\|dTs\|5mCs\|dTs\|5mCs\|o5mCs\|o5mCs\|oAs\|oGs\|o5mCs\|LAs\|oA] |
| 2903 | [oTs\|oGs\|oAs\|dTs\|5mCs\|5mCs\|dTs\|dGs\|dTs\|dTs\|5mCs\|dTs\|5mCs\|o5mCs\|o5mCs\|oAs\|oGs\|L5mCs\|oAs\|oA] |
| 2904 | [oTs\|oGs\|oAs\|dTs\|5mCs\|5mCs\|dTs\|dGs\|dTs\|dTs\|5mCs\|dTs\|5mCs\|o5mCs\|o5mCs\|oAs\|LGs\|o5mCs\|oAs\|oA] |
| 2905 | [oTs\|oGs\|oAs\|dTs\|5mCs\|5mCs\|dTs\|dGs\|dTs\|dTs\|5mCs\|dTs\|5mCs\|o5mCs\|o5mCs\|LAs\|oGs\|o5mCs\|oAs\|oA] |
| 2906 | [oTs\|oGs\|oAs\|dTs\|5mCs\|5mCs\|dTs\|dGs\|dTs\|dTs\|5mCs\|dTs\|5mCs\|o5mCs\|L5mCs\|oAs\|oGs\|o5mCs\|oAs\|oA] |
| 2907 | [oTs\|LGs\|oAs\|oTs\|o5mCs\|o5mCs\|oTs\|dGs\|dTs\|dTs\|5mCs\|dTs\|5mCs\|5mCs\|5mCs\|dAs\|dGs\|o5mCs\|oA] |
| 2908 | [oTs\|oGs\|LAs\|oTs\|o5mCs\|o5mCs\|oTs\|dGs\|dTs\|dTs\|5mCs\|dTs\|5mCs\|5mCs\|5mCs\|dAs\|dGs\|o5mCs\|oA] |
| 2909 | [oTs\|oGs\|oAs\|LTs\|o5mCs\|o5mCs\|oTs\|dGs\|dTs\|dTs\|5mCs\|dTs\|5mCs\|5mCs\|5mCs\|dAs\|dGs\|o5mCs\|oA] |
| 2910 | [oTs\|oGs\|oAs\|oTs\|L5mCs\|o5mCs\|oTs\|dGs\|dTs\|dTs\|5mCs\|dTs\|5mCs\|5mCs\|5mCs\|dAs\|dGs\|o5mCs\|oA] |
| 2911 | [oTs\|oGs\|oAs\|oTs\|o5mCs\|L5mCs\|oTs\|dGs\|dTs\|dTs\|5mCs\|dTs\|5mCs\|5mCs\|5mCs\|dAs\|dGs\|o5mCs\|oA] |
| 2912 | [oGs\|oAs\|dTs\|5mCs\|5mCs\|dTs\|dGs\|dTs\|dTs\|5mCs\|dTs\|5mCs\|o5mCs\|o5mCs\|oAs\|oGs\|o5mCs\|LAs\|oA] |
| 2913 | [oGs\|oAs\|dTs\|5mCs\|5mCs\|dTs\|dGs\|dTs\|dTs\|5mCs\|dTs\|5mCs\|o5mCs\|o5mCs\|oAs\|oGs\|L5mCs\|oAs\|oA] |
| 2914 | [oGs\|oAs\|dTs\|5mCs\|5mCs\|dTs\|dGs\|dTs\|dTs\|5mCs\|dTs\|5mCs\|o5mCs\|o5mCs\|oAs\|LGs\|o5mCs\|oAs\|oA] |
| 2915 | [oGs\|oAs\|dTs\|5mCs\|5mCs\|dTs\|dGs\|dTs\|dTs\|5mCs\|dTs\|5mCs\|o5mCs\|o5mCs\|LAs\|oGs\|o5mCs\|oAs\|oA] |
| 2916 | [oGs\|oAs\|dTs\|5mCs\|5mCs\|dTs\|dGs\|dTs\|dTs\|5mCs\|dTs\|5mCs\|o5mCs\|L5mCs\|oAs\|oGs\|o5mCs\|oAs\|oA] |
| 2917 | [oTs\|LGs\|oAs\|oTs\|o5mCs\|o5mCs\|dTs\|dGs\|dTs\|dTs\|5mCs\|dTs\|5mCs\|5mCs\|5mCs\|dAs\|oGs\|o5mCs\|oAs\|oA] |
| 2918 | [oTs\|oGs\|LAs\|oTs\|o5mCs\|o5mCs\|dTs\|dGs\|dTs\|dTs\|5mCs\|dTs\|5mCs\|5mCs\|5mCs\|dAs\|oGs\|o5mCs\|oAs\|oA] |
| 2919 | [oTs\|oGs\|oAs\|LTs\|o5mCs\|o5mCs\|dTs\|dGs\|dTs\|dTs\|5mCs\|dTs\|5mCs\|5mCs\|5mCs\|dAs\|oGs\|o5mCs\|oAs\|oA] |
| 2920 | [oTs\|oGs\|oAs\|oTs\|L5mCs\|o5mCs\|dTs\|dGs\|dTs\|dTs\|5mCs\|dTs\|5mCs\|5mCs\|5mCs\|dAs\|oGs\|o5mCs\|oAs\|oA] |
| 2921 | [oTs\|oGs\|oAs\|oTs\|5mCs\|5mCs\|dTs\|dGs\|dTs\|dTs\|5mCs\|dTs\|5mCs\|5mCs\|o5mCs\|oAs\|oGs\|o5mCs\|LAs\|oA] |
| 2922 | [oTs\|oGs\|oAs\|oTs\|5mCs\|5mCs\|dTs\|dGs\|dTs\|dTs\|5mCs\|dTs\|5mCs\|5mCs\|o5mCs\|oAs\|oGs\|L5mCs\|oAs\|oA] |
| 2923 | [oTs\|oGs\|oAs\|oTs\|5mCs\|5mCs\|dTs\|dGs\|dTs\|dTs\|5mCs\|dTs\|5mCs\|5mCs\|o5mCs\|oAs\|LGs\|o5mCs\|oAs\|oA] |
| 2924 | [oTs\|oGs\|oAs\|oTs\|5mCs\|5mCs\|dTs\|dGs\|dTs\|dTs\|5mCs\|dTs\|5mCs\|5mCs\|o5mCs\|LAs\|oGs\|o5mCs\|oAs\|oA] |
| 2925 | [oTs\|LGs\|oAs\|oTs\|o5mCs\|o5mCs\|dTs\|dGs\|dTs\|dTs\|5mCs\|dTs\|5mCs\|5mCs\|5mCs\|dAs\|oGs\|o5mCs\|oA] |
| 2926 | [oTs\|oGs\|LAs\|oTs\|o5mCs\|o5mCs\|dTs\|dGs\|dTs\|dTs\|5mCs\|dTs\|5mCs\|5mCs\|5mCs\|dAs\|oGs\|o5mCs\|oA] |
| 2927 | [oTs\|oGs\|oAs\|LTs\|o5mCs\|o5mCs\|dTs\|dGs\|dTs\|dTs\|5mCs\|dTs\|5mCs\|5mCs\|5mCs\|dAs\|oGs\|o5mCs\|oA] |
| 2928 | [oTs\|oGs\|oAs\|oTs\|L5mCs\|o5mCs\|dTs\|dGs\|dTs\|dTs\|5mCs\|dTs\|5mCs\|5mCs\|5mCs\|dAs\|oGs\|o5mCs\|oA] |
| 2929 | [oTs\|oGs\|oAs\|dTs\|5mCs\|5mCs\|dTs\|dGs\|dTs\|dTs\|5mCs\|dTs\|5mCs\|5mCs\|o5mCs\|oAs\|oGs\|o5mCs\|LAs\|oA] |
| 2930 | [oTs\|oGs\|oAs\|dTs\|5mCs\|5mCs\|dTs\|dGs\|dTs\|dTs\|5mCs\|dTs\|5mCs\|5mCs\|o5mCs\|oAs\|oGs\|L5mCs\|oAs\|oA] |
| 2931 | [oTs\|oGs\|oAs\|dTs\|5mCs\|5mCs\|dTs\|dGs\|dTs\|dTs\|5mCs\|dTs\|5mCs\|5mCs\|o5mCs\|oAs\|LGs\|o5mCs\|oAs\|oA] |
| 2932 | [oTs\|LGs\|oAs\|oTs\|o5mCs\|o5mCs\|dTs\|dGs\|dTs\|dTs\|5mCs\|dTs\|5mCs\|5mCs\|5mCs\|dAs\|oGs\|o5mC] |
| 2933 | [oTs\|oGs\|LAs\|oTs\|o5mCs\|o5mCs\|dTs\|dGs\|dTs\|dTs\|5mCs\|dTs\|5mCs\|5mCs\|5mCs\|dAs\|oGs\|o5mC] |
| 2934 | [oTs\|oGs\|oAs\|LTs\|o5mCs\|o5mCs\|dTs\|dGs\|dTs\|dTs\|5mCs\|dTs\|5mCs\|5mCs\|5mCs\|dAs\|oGs\|o5mC] |
| 2935 | [oTs\|oGs\|oAs\|oTs\|L5mCs\|o5mCs\|dTs\|dGs\|dTs\|dTs\|5mCs\|dTs\|5mCs\|5mCs\|5mCs\|dAs\|oGs\|o5mC] |
| 2936 | [oAs\|oTs\|5mCs\|5mCs\|dTs\|dGs\|dTs\|dTs\|5mCs\|dTs\|5mCs\|5mCs\|o5mCs\|oAs\|oGs\|o5mCs\|LAs\|oA] |
| 2937 | [oAs\|oTs\|5mCs\|5mCs\|dTs\|dGs\|dTs\|dTs\|5mCs\|dTs\|5mCs\|5mCs\|o5mCs\|oAs\|oGs\|L5mCs\|oAs\|oA] |
| 2938 | [oAs\|oTs\|5mCs\|5mCs\|dTs\|dGs\|dTs\|dTs\|5mCs\|dTs\|5mCs\|5mCs\|o5mCs\|oAs\|LGs\|o5mCs\|oAs\|oA] |
| 2939 | [oAs\|oTs\|5mCs\|5mCs\|dTs\|dGs\|dTs\|dTs\|5mCs\|dTs\|5mCs\|5mCs\|o5mCs\|LAs\|oGs\|o5mCs\|oAs\|oA] |
| 2940 | [oTs\|LGs\|oAs\|oTs\|o5mCs\|5mCs\|dTs\|dGs\|dTs\|dTs\|5mCs\|dTs\|5mCs\|5mCs\|5mCs\|oAs\|oGs\|o5mCs\|oAs\|oA] |
| 2941 | [oTs\|oGs\|LAs\|oTs\|o5mCs\|5mCs\|dTs\|dGs\|dTs\|dTs\|5mCs\|dTs\|5mCs\|5mCs\|5mCs\|oAs\|oGs\|o5mCs\|oAs\|oA] |
| 2942 | [oTs\|oGs\|oAs\|LTs\|o5mCs\|5mCs\|dTs\|dGs\|dTs\|dTs\|5mCs\|dTs\|5mCs\|5mCs\|5mCs\|oAs\|oGs\|o5mCs\|oAs\|oA] |
| 2943 | [oTs\|oGs\|oAs\|oTs\|o5mCs\|5mCs\|dTs\|dGs\|dTs\|dTs\|5mCs\|dTs\|5mCs\|5mCs\|5mCs\|oAs\|oGs\|o5mCs\|LAs\|oA] |
| 2944 | [oTs\|oGs\|oAs\|oTs\|o5mCs\|5mCs\|dTs\|dGs\|dTs\|dTs\|5mCs\|dTs\|5mCs\|5mCs\|5mCs\|oAs\|oGs\|L5mCs\|oAs\|oA] |
| 2945 | [oTs\|oGs\|oAs\|oTs\|o5mCs\|5mCs\|dTs\|dGs\|dTs\|dTs\|5mCs\|dTs\|5mCs\|5mCs\|5mCs\|oAs\|LGs\|o5mCs\|oAs\|oA] |
| 2946 | [oTs\|LGs\|oAs\|oTs\|o5mCs\|5mCs\|dTs\|dGs\|dTs\|dTs\|5mCs\|dTs\|5mCs\|5mCs\|5mCs\|oAs\|oGs\|o5mCs\|oA] |
| 2947 | [oTs\|oGs\|LAs\|oTs\|o5mCs\|5mCs\|dTs\|dGs\|dTs\|dTs\|5mCs\|dTs\|5mCs\|5mCs\|5mCs\|oAs\|oGs\|o5mCs\|oA] |
| 2948 | [oTs\|oGs\|oAs\|LTs\|o5mCs\|5mCs\|dTs\|dGs\|dTs\|dTs\|5mCs\|dTs\|5mCs\|5mCs\|5mCs\|oAs\|oGs\|o5mCs\|oA] |
| 2949 | [oGs\|oAs\|oTs\|o5mCs\|5mCs\|dTs\|dGs\|dTs\|dTs\|5mCs\|dTs\|5mCs\|5mCs\|5mCs\|oAs\|oGs\|o5mCs\|LAs\|oA] |
| 2950 | [oGs\|oAs\|oTs\|o5mCs\|5mCs\|dTs\|dGs\|dTs\|dTs\|5mCs\|dTs\|5mCs\|5mCs\|5mCs\|oAs\|oGs\|L5mCs\|oAs\|oA] |
| 2951 | [oGs\|oAs\|oTs\|o5mCs\|5mCs\|dTs\|dGs\|dTs\|dTs\|5mCs\|dTs\|5mCs\|5mCs\|5mCs\|oAs\|LGs\|o5mCs\|oAs\|oA] |
| 2952 | [oTs\|LGs\|oAs\|oTs\|o5mCs\|5mCs\|dTs\|dGs\|dTs\|dTs\|5mCs\|dTs\|5mCs\|5mCs\|5mCs\|oAs\|oGs\|o5mC] |
| 2953 | [oTs\|oGs\|LAs\|oTs\|o5mCs\|5mCs\|dTs\|dGs\|dTs\|dTs\|5mCs\|dTs\|5mCs\|5mCs\|5mCs\|oAs\|oGs\|o5mC] |
| 2954 | [oTs\|oGs\|oAs\|LTs\|o5mCs\|5mCs\|dTs\|dGs\|dTs\|dTs\|5mCs\|dTs\|5mCs\|5mCs\|5mCs\|oAs\|oGs\|o5mC] |
| 2955 | [oAs\|oTs\|o5mCs\|5mCs\|dTs\|dGs\|dTs\|dTs\|5mCs\|dTs\|5mCs\|5mCs\|5mCs\|oAs\|oGs\|o5mCs\|LAs\|oA] |
| 2956 | [oAs\|oTs\|o5mCs\|5mCs\|dTs\|dGs\|dTs\|dTs\|5mCs\|dTs\|5mCs\|5mCs\|5mCs\|oAs\|oGs\|L5mCs\|oAs\|oA] |
| 2957 | [oAs\|oTs\|o5mCs\|5mCs\|dTs\|dGs\|dTs\|dTs\|5mCs\|dTs\|5mCs\|5mCs\|5mCs\|oAs\|LGs\|o5mCs\|oAs\|oA] |
| 2958 | [oTs\|LGs\|oAs\|oTs\|o5mCs\|5mCs\|dTs\|dGs\|dTs\|dTs\|5mCs\|dTs\|5mCs\|5mCs\|5mCs\|oAs\|oG] |
| 2959 | [oTs\|oGs\|LAs\|oTs\|o5mCs\|5mCs\|dTs\|dGs\|dTs\|dTs\|5mCs\|dTs\|5mCs\|5mCs\|5mCs\|oAs\|oG] |
| 2960 | [oTs\|oGs\|oAs\|LTs\|o5mCs\|5mCs\|dTs\|dGs\|dTs\|dTs\|5mCs\|dTs\|5mCs\|5mCs\|5mCs\|oAs\|oG] |
| 2961 | [oTs\|o5mCs\|5mCs\|dTs\|dGs\|dTs\|dTs\|5mCs\|dTs\|5mCs\|5mCs\|5mCs\|oAs\|oGs\|o5mCs\|LAs\|oA] |
| 2962 | [oTs\|o5mCs\|5mCs\|dTs\|dGs\|dTs\|dTs\|5mCs\|dTs\|5mCs\|5mCs\|5mCs\|oAs\|oGs\|L5mCs\|oAs\|oA] |
| 2963 | [oTs\|o5mCs\|5mCs\|dTs\|dGs\|dTs\|dTs\|5mCs\|dTs\|5mCs\|5mCs\|5mCs\|oAs\|LGs\|o5mCs\|oAs\|oA] |
| 2964 | [oGs\|LAs\|oTs\|o5mCs\|5mCs\|dTs\|dGs\|dTs\|dTs\|5mCs\|dTs\|5mCs\|5mCs\|5mCs\|oAs\|oGs\|o5mCs\|oAs\|oA] |
| 2965 | [oGs\|oAs\|LTs\|o5mCs\|5mCs\|dTs\|dGs\|dTs\|dTs\|5mCs\|dTs\|5mCs\|5mCs\|5mCs\|oAs\|oGs\|o5mCs\|oAs\|oA] |
| 2966 | [oTs\|oGs\|oAs\|oTs\|o5mCs\|5mCs\|dTs\|dGs\|dTs\|dTs\|5mCs\|dTs\|5mCs\|5mCs\|5mCs\|oAs\|oGs\|L5mCs\|oA] |
| 2967 | [oTs\|oGs\|oAs\|oTs\|o5mCs\|5mCs\|dTs\|dGs\|dTs\|dTs\|5mCs\|dTs\|5mCs\|5mCs\|5mCs\|oAs\|LGs\|o5mCs\|oA] |
| 2968 | [oGs\|LAs\|oTs\|o5mCs\|5mCs\|dTs\|dGs\|dTs\|dTs\|5mCs\|dTs\|5mCs\|5mCs\|5mCs\|oAs\|oGs\|o5mCs\|oA] |
| 2969 | [oGs\|oAs\|LTs\|o5mCs\|5mCs\|dTs\|dGs\|dTs\|dTs\|5mCs\|dTs\|5mCs\|5mCs\|5mCs\|oAs\|oGs\|o5mCs\|oA] |
| 2970 | [oGs\|oAs\|oTs\|o5mCs\|5mCs\|dTs\|dGs\|dTs\|dTs\|5mCs\|dTs\|5mCs\|5mCs\|5mCs\|oAs\|oGs\|L5mCs\|oA] |
| 2971 | [oGs\|oAs\|oTs\|o5mCs\|5mCs\|dTs\|dGs\|dTs\|dTs\|5mCs\|dTs\|5mCs\|5mCs\|5mCs\|oAs\|LGs\|o5mCs\|oA] |
| 2972 | [oGs\|LAs\|oTs\|o5mCs\|5mCs\|dTs\|dGs\|dTs\|dTs\|5mCs\|dTs\|5mCs\|5mCs\|5mCs\|oAs\|oGs\|o5mC] |
| 2973 | [oGs\|oAs\|LTs\|o5mCs\|5mCs\|dTs\|dGs\|dTs\|dTs\|5mCs\|dTs\|5mCs\|5mCs\|5mCs\|oAs\|oGs\|o5mC] |
| 2974 | [oGs\|oAs\|oTs\|o5mCs\|5mCs\|dTs\|dGs\|dTs\|dTs\|5mCs\|dTs\|5mCs\|5mCs\|5mCs\|oAs\|LGs\|o5mC] |
| 2975 | [oTs\|oGs\|oAs\|oTs\|o5mCs\|o5mCs\|oTs\|oGs\|dTs\|dTs\|5mCs\|dTs\|5mCs\|5mCs\|5mCs\|dAs\|dGs\|5mCs\|oAs\|oA] |
| 2976 | [oTs\|oGs\|dAs\|dTs\|5mCs\|5mCs\|dTs\|dGs\|dTs\|dTs\|5mCs\|dTs\|o5mCs\|o5mCs\|o5mCs\|oAs\|oGs\|o5mCs\|oAs\|oA] |
| 2977 | [oTs\|oGs\|oAs\|oTs\|o5mCs\|o5mCs\|oTs\|dGs\|dTs\|dTs\|5mCs\|dTs\|5mCs\|5mCs\|5mCs\|dAs\|dGs\|o5mCs\|oAs\|oA] |
| 2978 | [oTs\|oGs\|oAs\|dTs\|5mCs\|5mCs\|dTs\|dGs\|dTs\|dTs\|5mCs\|dTs\|5mCs\|o5mCs\|o5mCs\|oAs\|oGs\|o5mCs\|oAs\|oA] |
| 2979 | [oTs\|oGs\|oAs\|oTs\|o5mCs\|o5mCs\|oTs\|dGs\|dTs\|dTs\|5mCs\|dTs\|5mCs\|5mCs\|5mCs\|dAs\|dGs\|o5mCs\|oA] |
| 2980 | [oGs\|oAs\|dTs\|5mCs\|5mCs\|dTs\|dGs\|dTs\|dTs\|5mCs\|dTs\|5mCs\|o5mCs\|o5mCs\|oAs\|oGs\|o5mCs\|oAs\|oA] |
| 2981 | [oTs\|oGs\|oAs\|oTs\|o5mCs\|o5mCs\|dTs\|dGs\|dTs\|dTs\|5mCs\|dTs\|5mCs\|5mCs\|5mCs\|dAs\|oGs\|o5mCs\|oAs\|oA] |
| 2982 | [oTs\|oGs\|oAs\|oTs\|5mCs\|5mCs\|dTs\|dGs\|dTs\|dTs\|5mCs\|dTs\|5mCs\|5mCs\|o5mCs\|oAs\|oGs\|o5mCs\|oAs\|oA] |
| 2983 | [oTs\|oGs\|oAs\|oTs\|o5mCs\|o5mCs\|dTs\|dGs\|dTs\|dTs\|5mCs\|dTs\|5mCs\|5mCs\|5mCs\|dAs\|oGs\|o5mCs\|oA] |
| 2984 | [oTs\|oGs\|oAs\|dTs\|5mCs\|5mCs\|dTs\|dGs\|dTs\|dTs\|5mCs\|dTs\|5mCs\|5mCs\|o5mCs\|oAs\|oGs\|o5mCs\|oAs\|oA] |
| 2985 | [oTs\|oGs\|oAs\|oTs\|o5mCs\|o5mCs\|dTs\|dGs\|dTs\|dTs\|5mCs\|dTs\|5mCs\|5mCs\|5mCs\|dAs\|oGs\|o5mC] |
| 2986 | [oAs\|oTs\|5mCs\|5mCs\|dTs\|dGs\|dTs\|dTs\|5mCs\|dTs\|5mCs\|5mCs\|o5mCs\|oAs\|oGs\|o5mCs\|oAs\|oA] |
| 2987 | [oTs\|oGs\|oAs\|oTs\|o5mCs\|5mCs\|dTs\|dGs\|dTs\|dTs\|5mCs\|dTs\|5mCs\|5mCs\|5mCs\|oAs\|oGs\|o5mCs\|oAs\|oA] |
| 2988 | [oTs\|oGs\|oAs\|oTs\|o5mCs\|5mCs\|dTs\|dGs\|dTs\|dTs\|5mCs\|dTs\|5mCs\|5mCs\|5mCs\|oAs\|oGs\|o5mCs\|oA] |
| 2989 | [oTs\|oGs\|oAs\|oTs\|o5mCs\|5mCs\|dTs\|dGs\|dTs\|dTs\|5mCs\|dTs\|5mCs\|5mCs\|5mCs\|oAs\|oGs\|o5mC] |
| 2990 | [oAs\|oTs\|o5mCs\|5mCs\|dTs\|dGs\|dTs\|dTs\|5mCs\|dTs\|5mCs\|5mCs\|5mCs\|oAs\|oGs\|o5mCs\|oAs\|oA] |
| 2991 | [oTs\|oGs\|oAs\|oTs\|o5mCs\|5mCs\|dTs\|dGs\|dTs\|dTs\|5mCs\|dTs\|5mCs\|5mCs\|5mCs\|oAs\|oG] |
| 2992 | [oTs\|o5mCs\|5mCs\|dTs\|dGs\|dTs\|dTs\|5mCs\|dTs\|5mCs\|5mCs\|5mCs\|oAs\|oGs\|o5mCs\|oAs\|oA] |
| 2993 | [oGs\|oAs\|oTs\|o5mCs\|5mCs\|dTs\|dGs\|dTs\|dTs\|5mCs\|dTs\|5mCs\|5mCs\|5mCs\|oAs\|oGs\|o5mCs\|oAs\|oA] |
| 2994 | [oGs\|oAs\|oTs\|o5mCs\|5mCs\|dTs\|dGs\|dTs\|dTs\|5mCs\|dTs\|5mCs\|5mCs\|5mCs\|oAs\|oGs\|o5mCs\|oA] |
| 2995 | [oGs\|oAs\|oTs\|o5mCs\|5mCs\|dTs\|dGs\|dTs\|dTs\|5mCs\|dTs\|5mCs\|5mCs\|5mCs\|oAs\|oGs\|o5mC] |
| 2996 | [oTs\|oGs\|oAp\|oTs\|o5mCs\|5mCs\|dTs\|dGs\|dTs\|dTs\|5mCs\|dTs\|5mCs\|5mCs\|5mCs\|oAs\|oGs\|o5mCs\|oAs\|oA] |
| 2997 | [oTs\|oGs\|oAs\|oTp\|o5mCs\|5mCs\|dTs\|dGs\|dTs\|dTs\|5mCs\|dTs\|5mCs\|5mCs\|5mCs\|oAs\|oGs\|o5mCs\|oAs\|oA] |
| 2998 | [oTs\|oGs\|oAp\|oTp\|o5mCs\|5mCs\|dTs\|dGs\|dTs\|dTs\|5mCs\|dTs\|5mCs\|5mCs\|5mCs\|oAs\|oGs\|o5mCs\|oAs\|oA] |
| 2999 | [oTs\|oGs\|oAs\|oTs\|o5mCs\|5mCs\|dTs\|dGs\|dTs\|dTs\|5mCs\|dTs\|5mCs\|5mCs\|5mCs\|oAs\|oGp\|o5mCs\|oAs\|oA] |
| 3000 | [oTs\|oGs\|oAs\|oTs\|o5mCs\|5mCs\|dTs\|dGs\|dTs\|dTs\|5mCs\|dTs\|5mCs\|5mCs\|5mCs\|oAp\|oGs\|o5mCs\|oAs\|oA] |
| 3001 | [oTs\|oGs\|oAs\|oTs\|o5mCs\|5mCs\|dTs\|dGs\|dTs\|dTs\|5mCs\|dTs\|5mCs\|5mCs\|5mCs\|oAp\|oGp\|o5mCs\|oAs\|oA] |
| 3002 | [oTs\|oGs\|oAp\|oTs\|o5mCs\|5mCs\|dTs\|dGs\|dTs\|dTs\|5mCs\|dTs\|5mCs\|5mCs\|5mCs\|oAs\|oGp\|o5mCs\|oAs\|oA] |
| 3003 | [oTs\|oGs\|oAp\|oTs\|o5mCs\|5mCs\|dTs\|dGs\|dTs\|dTs\|5mCs\|dTs\|5mCs\|5mCs\|5mCs\|oAp\|oGs\|o5mCs\|oAs\|oA] |
| 3004 | [oTs\|oGs\|oAs\|oTp\|o5mCs\|5mCs\|dTs\|dGs\|dTs\|dTs\|5mCs\|dTs\|5mCs\|5mCs\|5mCs\|oAs\|oGp\|o5mCs\|oAs\|oA] |
| 3005 | [oTs\|oGs\|oAs\|oTp\|o5mCs\|5mCs\|dTs\|dGs\|dTs\|dTs\|5mCs\|dTs\|5mCs\|5mCs\|5mCs\|oAp\|oGs\|o5mCs\|oAs\|oA] |
| 3006 | [oTs\|oGs\|oAp\|oTs\|o5mCs\|5mCs\|dTs\|dGs\|dTs\|dTs\|5mCs\|dTs\|5mCs\|5mCs\|5mCs\|oAp\|oGp\|o5mCs\|oAs\|oA] |
| 3007 | [oTs\|oGs\|oAs\|oTp\|o5mCs\|5mCs\|dTs\|dGs\|dTs\|dTs\|5mCs\|dTs\|5mCs\|5mCs\|5mCs\|oAp\|oGp\|o5mCs\|oAs\|oA] |
| 3008 | [oTs\|oGs\|oAp\|oTp\|o5mCs\|5mCs\|dTs\|dGs\|dTs\|dTs\|5mCs\|dTs\|5mCs\|5mCs\|5mCs\|oAs\|oGp\|o5mCs\|oAs\|oA] |
| 3009 | [oTs\|oGs\|oAp\|oTp\|o5mCs\|5mCs\|dTs\|dGs\|dTs\|dTs\|5mCs\|dTs\|5mCs\|5mCs\|5mCs\|oAp\|oGs\|o5mCs\|oAs\|oA] |
| 3010 | [oTs\|oGs\|oAp\|oTp\|o5mCs\|5mCs\|dTs\|dGs\|dTs\|dTs\|5mCs\|dTs\|5mCs\|5mCs\|5mCs\|oAp\|oGp\|o5mCs\|oAs\|oA] |
| 3011 | [oTs\|oGs\|oAs\|oTs\|o5mCs\|5mCs\|dTs\|dGs\|dTs\|dTs\|5mCs\|dTs\|5mCs\|5mCs\|5mCs\|oAs\|oGs\|o5mCs\|oAs\|oAs\|o5mC] |
| 3012 | [oTs\|oGs\|oAp\|oTs\|o5mCs\|5mCs\|dTs\|dGs\|dTs\|dTs\|5mCs\|dTs\|5mCs\|5mCs\|5mCs\|oAs\|oGs\|o5mCs\|oAs\|oAs\|o5mC] |
| 3013 | [oTs\|oGs\|oAs\|oTp\|o5mCs\|5mCs\|dTs\|dGs\|dTs\|dTs\|5mCs\|dTs\|5mCs\|5mCs\|5mCs\|oAs\|oGs\|o5mCs\|oAs\|oAs\|o5mC] |
| 3014 | [oTs\|oGs\|oAp\|oTp\|o5mCs\|5mCs\|dTs\|dGs\|dTs\|dTs\|5mCs\|dTs\|5mCs\|5mCs\|5mCs\|oAs\|oGs\|o5mCs\|oAs\|oAs\|o5mC] |
| 3015 | [oTs\|oGs\|oAs\|oTs\|o5mCs\|5mCs\|dTs\|dGs\|dTs\|dTs\|5mCs\|dTs\|5mCs\|5mCs\|5mCs\|oAs\|oGp\|o5mCs\|oAs\|oAs\|o5mC] |
| 3016 | [oTs\|oGs\|oAs\|oTs\|o5mCs\|5mCs\|dTs\|dGs\|dTs\|dTs\|5mCs\|dTs\|5mCs\|5mCs\|5mCs\|oAp\|oGs\|o5mCs\|oAs\|oAs\|o5mC] |
| 3017 | [oTs\|oGs\|oAs\|oTs\|o5mCs\|5mCs\|dTs\|dGs\|dTs\|dTs\|5mCs\|dTs\|5mCs\|5mCs\|5mCs\|oAp\|oGp\|o5mCs\|oAs\|oAs\|o5mC] |
| 3018 | [oTs\|oGs\|oAp\|oTs\|o5mCs\|5mCs\|dTs\|dGs\|dTs\|dTs\|5mCs\|dTs\|5mCs\|5mCs\|5mCs\|oAs\|oGp\|o5mCs\|oAs\|oAs\|o5mC] |
| 3019 | [oTs\|oGs\|oAp\|oTs\|o5mCs\|5mCs\|dTs\|dGs\|dTs\|dTs\|5mCs\|dTs\|5mCs\|5mCs\|5mCs\|oAp\|oGs\|o5mCs\|oAs\|oAs\|o5mC] |
| 3020 | [oTs\|oGs\|oAs\|oTp\|o5mCs\|5mCs\|dTs\|dGs\|dTs\|dTs\|5mCs\|dTs\|5mCs\|5mCs\|5mCs\|oAs\|oGp\|o5mCs\|oAs\|oAs\|o5mC] |
| 3021 | [oTs\|oGs\|oAs\|oTp\|o5mCs\|5mCs\|dTs\|dGs\|dTs\|dTs\|5mCs\|dTs\|5mCs\|5mCs\|5mCs\|oAp\|oGs\|o5mCs\|oAs\|oAs\|o5mC] |
| 3022 | [oTs\|oGs\|oAp\|oTs\|o5mCs\|5mCs\|dTs\|dGs\|dTs\|dTs\|5mCs\|dTs\|5mCs\|5mCs\|5mCs\|oAp\|oGp\|o5mCs\|oAs\|oAs\|o5mC] |
| 3023 | [oTs\|oGs\|oAs\|oTp\|o5mCs\|5mCs\|dTs\|dGs\|dTs\|dTs\|5mCs\|dTs\|5mCs\|5mCs\|5mCs\|oAp\|oGp\|o5mCs\|oAs\|oAs\|o5mC] |
| 3024 | [oTs\|oGs\|oAp\|oTp\|o5mCs\|5mCs\|dTs\|dGs\|dTs\|dTs\|5mCs\|dTs\|5mCs\|5mCs\|5mCs\|oAs\|oGp\|o5mCs\|oAs\|oAs\|o5mC] |
| 3025 | [oTs\|oGs\|oAp\|oTp\|o5mCs\|5mCs\|dTs\|dGs\|dTs\|dTs\|5mCs\|dTs\|5mCs\|5mCs\|5mCs\|oAp\|oGs\|o5mCs\|oAs\|oAs\|o5mC] |
| 3026 | [oTs\|oGs\|oAp\|oTp\|o5mCs\|5mCs\|dTs\|dGs\|dTs\|dTs\|5mCs\|dTs\|5mCs\|5mCs\|5mCs\|oAp\|oGp\|o5mCs\|oAs\|oAs\|o5mC] |
| 3027 | [oTs\|oGs\|oAs\|oTs\|o5mCs\|5mCs\|dTs\|dGs\|dTs\|dTs\|5mCs\|dTs\|5mCs\|5mCs\|5mCs\|oAs\|oGs\|o5mCs\|oAs\|oAs\|o5mCs\|oA] |
| 3028 | [oTs\|oGs\|oAp\|oTs\|o5mCs\|5mCs\|dTs\|dGs\|dTs\|dTs\|5mCs\|dTs\|5mCs\|5mCs\|5mCs\|oAs\|oGs\|o5mCs\|oAs\|oAs\|o5mCs\|oA] |
| 3029 | [oTs\|oGs\|oAs\|oTp\|o5mCs\|5mCs\|dTs\|dGs\|dTs\|dTs\|5mCs\|dTs\|5mCs\|5mCs\|5mCs\|oAs\|oGs\|o5mCs\|oAs\|oAs\|o5mCs\|oA] |
| 3030 | [oTs\|oGs\|oAp\|oTp\|o5mCs\|5mCs\|dTs\|dGs\|dTs\|dTs\|5mCs\|dTs\|5mCs\|5mCs\|5mCs\|oAs\|oGs\|o5mCs\|oAs\|oAs\|o5mCs\|oA] |
| 3031 | [oTs\|oGs\|oAs\|oTs\|o5mCs\|5mCs\|dTs\|dGs\|dTs\|dTs\|5mCs\|dTs\|5mCs\|5mCs\|5mCs\|oAs\|oGp\|o5mCs\|oAs\|oAs\|o5mCs\|oA] |
| 3032 | [oTs\|oGs\|oAs\|oTs\|o5mCs\|5mCs\|dTs\|dGs\|dTs\|dTs\|5mCs\|dTs\|5mCs\|5mCs\|5mCs\|oAp\|oGs\|o5mCs\|oAs\|oAs\|o5mCs\|oA] |
| 3033 | [oTs\|oGs\|oAs\|oTs\|o5mCs\|5mCs\|dTs\|dGs\|dTs\|dTs\|5mCs\|dTs\|5mCs\|5mCs\|5mCs\|oAp\|oGp\|o5mCs\|oAs\|oAs\|o5mCs\|oA] |
| 3034 | [oTs\|oGs\|oAp\|oTs\|o5mCs\|5mCs\|dTs\|dGs\|dTs\|dTs\|5mCs\|dTs\|5mCs\|5mCs\|5mCs\|oAs\|oGp\|o5mCs\|oAs\|oAs\|o5mCs\|oA] |
| 3035 | [oTs\|oGs\|oAp\|oTs\|o5mCs\|5mCs\|dTs\|dGs\|dTs\|dTs\|5mCs\|dTs\|5mCs\|5mCs\|5mCs\|oAp\|oGs\|o5mCs\|oAs\|oAs\|o5mCs\|oA] |
| 3036 | [oTs\|oGs\|oAs\|oTp\|o5mCs\|5mCs\|dTs\|dGs\|dTs\|dTs\|5mCs\|dTs\|5mCs\|5mCs\|5mCs\|oAs\|oGp\|o5mCs\|oAs\|oAs\|o5mCs\|oA] |
| 3037 | [oTs\|oGs\|oAs\|oTp\|o5mCs\|5mCs\|dTs\|dGs\|dTs\|dTs\|5mCs\|dTs\|5mCs\|5mCs\|5mCs\|oAp\|oGs\|o5mCs\|oAs\|oAs\|o5mCs\|oA] |
| 3038 | [oTs\|oGs\|oAp\|oTs\|o5mCs\|5mCs\|dTs\|dGs\|dTs\|dTs\|5mCs\|dTs\|5mCs\|5mCs\|5mCs\|oAp\|oGp\|o5mCs\|oAs\|oAs\|o5mCs\|oA] |
| 3039 | [oTs\|oGs\|oAs\|oTp\|o5mCs\|5mCs\|dTs\|dGs\|dTs\|dTs\|5mCs\|dTs\|5mCs\|5mCs\|5mCs\|oAp\|oGp\|o5mCs\|oAs\|oAs\|o5mCs\|oA] |
| 3040 | [oTs\|oGs\|oAp\|oTp\|o5mCs\|5mCs\|dTs\|dGs\|dTs\|dTs\|5mCs\|dTs\|5mCs\|5mCs\|5mCs\|oAs\|oGp\|o5mCs\|oAs\|oAs\|o5mCs\|oA] |
| 3041 | [oTs\|oGs\|oAp\|oTp\|o5mCs\|5mCs\|dTs\|dGs\|dTs\|dTs\|5mCs\|dTs\|5mCs\|5mCs\|5mCs\|oAp\|oGs\|o5mCs\|oAs\|oAs\|o5mCs\|oA] |
| 3042 | [oTs\|oGs\|oAp\|oTp\|o5mCs\|5mCs\|dTs\|dGs\|dTs\|dTs\|5mCs\|dTs\|5mCs\|5mCs\|5mCs\|oAp\|oGp\|o5mCs\|oAs\|oAs\|o5mCs\|oA] |
| 3043 | [oTs\|oGs\|oAs\|oTs\|o5mCs\|5mCs\|dTs\|dGs\|dTs\|dTs\|5mCs\|dTs\|5mCs\|5mCs\|5mCs\|oAs\|oGs\|o5mCs\|oAs\|oAs\|o5mCs\|oAs\|o5mC] |
| 3044 | [oTs\|oGs\|oAp\|oTs\|o5mCs\|5mCs\|dTs\|dGs\|dTs\|dTs\|5mCs\|dTs\|5mCs\|5mCs\|5mCs\|oAs\|oGs\|o5mCs\|oAs\|oAs\|o5mCs\|oAs\|o5mC] |
| 3045 | [oTs\|oGs\|oAs\|oTp\|o5mCs\|5mCs\|dTs\|dGs\|dTs\|dTs\|5mCs\|dTs\|5mCs\|5mCs\|5mCs\|oAs\|oGs\|o5mCs\|oAs\|oAs\|o5mCs\|oAs\|o5mC] |
| 3046 | [oTs\|oGs\|oAp\|oTp\|o5mCs\|5mCs\|dTs\|dGs\|dTs\|dTs\|5mCs\|dTs\|5mCs\|5mCs\|5mCs\|oAs\|oGs\|o5mCs\|oAs\|oAs\|o5mCs\|oAs\|o5mC] |
| 3047 | [oTs\|oGs\|oAs\|oTs\|o5mCs\|5mCs\|dTs\|dGs\|dTs\|dTs\|5mCs\|dTs\|5mCs\|5mCs\|5mCs\|oAs\|oGp\|o5mCs\|oAs\|oAs\|o5mCs\|oAs\|o5mC] |
| 3048 | [oTs\|oGs\|oAs\|oTs\|o5mCs\|5mCs\|dTs\|dGs\|dTs\|dTs\|5mCs\|dTs\|5mCs\|5mCs\|5mCs\|oAp\|oGs\|o5mCs\|oAs\|oAs\|o5mCs\|oAs\|o5mC] |
| 3049 | [oTs\|oGs\|oAs\|oTs\|o5mCs\|5mCs\|dTs\|dGs\|dTs\|dTs\|5mCs\|dTs\|5mCs\|5mCs\|5mCs\|oAp\|oGp\|o5mCs\|oAs\|oAs\|o5mCs\|oAs\|o5mC] |
| 3050 | [oTs\|oGs\|oAp\|oTs\|o5mCs\|5mCs\|dTs\|dGs\|dTs\|dTs\|5mCs\|dTs\|5mCs\|5mCs\|5mCs\|oAs\|oGp\|o5mCs\|oAs\|oAs\|o5mCs\|oAs\|o5mC] |
| 3051 | [oTs\|oGs\|oAp\|oTs\|o5mCs\|5mCs\|dTs\|dGs\|dTs\|dTs\|5mCs\|dTs\|5mCs\|5mCs\|5mCs\|oAp\|oGs\|o5mCs\|oAs\|oAs\|o5mCs\|oAs\|o5mC] |
| 3052 | [oTs\|oGs\|oAs\|oTp\|o5mCs\|5mCs\|dTs\|dGs\|dTs\|dTs\|5mCs\|dTs\|5mCs\|5mCs\|5mCs\|oAs\|oGp\|o5mCs\|oAs\|oAs\|o5mCs\|oAs\|o5mC] |
| 3053 | [oTs\|oGs\|oAs\|oTp\|o5mCs\|5mCs\|dTs\|dGs\|dTs\|dTs\|5mCs\|dTs\|5mCs\|5mCs\|5mCs\|oAp\|oGs\|o5mCs\|oAs\|oAs\|o5mCs\|oAs\|o5mC] |
| 3054 | [oTs\|oGs\|oAp\|oTs\|o5mCs\|5mCs\|dTs\|dGs\|dTs\|dTs\|5mCs\|dTs\|5mCs\|5mCs\|5mCs\|oAp\|oGp\|o5mCs\|oAs\|oAs\|o5mCs\|oAs\|o5mC] |
| 3055 | [oTs\|oGs\|oAs\|oTp\|o5mCs\|5mCs\|dTs\|dGs\|dTs\|dTs\|5mCs\|dTs\|5mCs\|5mCs\|5mCs\|oAp\|oGp\|o5mCs\|oAs\|oAs\|o5mCs\|oAs\|o5mC] |
| 3056 | [oTs\|oGs\|oAp\|oTp\|o5mCs\|5mCs\|dTs\|dGs\|dTs\|dTs\|5mCs\|dTs\|5mCs\|5mCs\|5mCs\|oAs\|oGp\|o5mCs\|oAs\|oAs\|o5mCs\|oAs\|o5mC] |
| 3057 | [oTs\|oGs\|oAp\|oTp\|o5mCs\|5mCs\|dTs\|dGs\|dTs\|dTs\|5mCs\|dTs\|5mCs\|5mCs\|5mCs\|oAp\|oGs\|o5mCs\|oAs\|oAs\|o5mCs\|oAs\|o5mC] |
| 3058 | [oTs\|oGs\|oAp\|oTp\|o5mCs\|5mCs\|dTs\|dGs\|dTs\|dTs\|5mCs\|dTs\|5mCs\|5mCs\|5mCs\|oAp\|oGp\|o5mCs\|oAs\|oAs\|o5mCs\|oAs\|o5mC] |
| 3059 | [oTs\|oGs\|oAs\|oTs\|o5mCs\|5mCs\|dTs\|dGs\|dTs\|dTs\|5mCs\|dTs\|5mCs\|5mCs\|5mCs\|dAs\|oGs\|o5mCs\|oAs\|oAs\|o5mC] |
| 3060 | [oTs\|oGs\|oAp\|oTs\|o5mCs\|5mCs\|dTs\|dGs\|dTs\|dTs\|5mCs\|dTs\|5mCs\|5mCs\|5mCs\|dAs\|oGs\|o5mCs\|oAs\|oAs\|o5mC] |
| 3061 | [oTs\|oGs\|oAs\|oTp\|o5mCs\|5mCs\|dTs\|dGs\|dTs\|dTs\|5mCs\|dTs\|5mCs\|5mCs\|5mCs\|dAs\|oGs\|o5mCs\|oAs\|oAs\|o5mC] |
| 3062 | [oTs\|oGs\|oAp\|oTp\|o5mCs\|5mCs\|dTs\|dGs\|dTs\|dTs\|5mCs\|dTs\|5mCs\|5mCs\|5mCs\|dAs\|oGs\|o5mCs\|oAs\|oAs\|o5mC] |
| 3063 | [oTs\|oGs\|oAs\|oTs\|o5mCs\|5mCs\|dTs\|dGs\|dTs\|dTs\|5mCs\|dTs\|5mCs\|5mCs\|5mCs\|dAs\|oGp\|o5mCs\|oAs\|oAs\|o5mC] |
| 3064 | [oTs\|oGs\|oAs\|oTs\|o5mCs\|5mCs\|dTs\|dGs\|dTs\|dTs\|5mCs\|dTs\|5mCs\|5mCs\|5mCs\|dAp\|oGs\|o5mCs\|oAs\|oAs\|o5mC] |
| 3065 | [oTs\|oGs\|oAs\|oTs\|o5mCs\|5mCs\|dTs\|dGs\|dTs\|dTs\|5mCs\|dTs\|5mCs\|5mCs\|5mCs\|dAp\|oGp\|o5mCs\|oAs\|oAs\|o5mC] |
| 3066 | [oTs\|oGs\|oAp\|oTs\|o5mCs\|5mCs\|dTs\|dGs\|dTs\|dTs\|5mCs\|dTs\|5mCs\|5mCs\|5mCs\|dAs\|oGp\|o5mCs\|oAs\|oAs\|o5mC] |
| 3067 | [oTs\|oGs\|oAp\|oTs\|o5mCs\|5mCs\|dTs\|dGs\|dTs\|dTs\|5mCs\|dTs\|5mCs\|5mCs\|5mCs\|dAp\|oGs\|o5mCs\|oAs\|oAs\|o5mC] |
| 3068 | [oTs\|oGs\|oAs\|oTp\|o5mCs\|5mCs\|dTs\|dGs\|dTs\|dTs\|5mCs\|dTs\|5mCs\|5mCs\|5mCs\|dAs\|oGp\|o5mCs\|oAs\|oAs\|o5mC] |
| 3069 | [oTs\|oGs\|oAs\|oTp\|o5mCs\|5mCs\|dTs\|dGs\|dTs\|dTs\|5mCs\|dTs\|5mCs\|5mCs\|5mCs\|dAp\|oGs\|o5mCs\|oAs\|oAs\|o5mC] |
| 3070 | [oTs\|oGs\|oAp\|oTs\|o5mCs\|5mCs\|dTs\|dGs\|dTs\|dTs\|5mCs\|dTs\|5mCs\|5mCs\|5mCs\|dAp\|oGp\|o5mCs\|oAs\|oAs\|o5mC] |
| 3071 | [oTs\|oGs\|oAs\|oTp\|o5mCs\|5mCs\|dTs\|dGs\|dTs\|dTs\|5mCs\|dTs\|5mCs\|5mCs\|5mCs\|dAp\|oGp\|o5mCs\|oAs\|oAs\|o5mC] |
| 3072 | [oTs\|oGs\|oAp\|oTp\|o5mCs\|5mCs\|dTs\|dGs\|dTs\|dTs\|5mCs\|dTs\|5mCs\|5mCs\|5mCs\|dAs\|oGp\|o5mCs\|oAs\|oAs\|o5mC] |
| 3073 | [oTs\|oGs\|oAp\|oTp\|o5mCs\|5mCs\|dTs\|dGs\|dTs\|dTs\|5mCs\|dTs\|5mCs\|5mCs\|5mCs\|dAp\|oGs\|o5mCs\|oAs\|oAs\|o5mC] |
| 3074 | [oTs\|oGs\|oAp\|oTp\|o5mCs\|5mCs\|dTs\|dGs\|dTs\|dTs\|5mCs\|dTs\|5mCs\|5mCs\|5mCs\|dAp\|oGp\|o5mCs\|oAs\|oAs\|o5mC] |
| 3075 | [oTs\|oGs\|oAs\|oTs\|o5mCs\|5mCs\|dTs\|dGs\|dTs\|dTs\|5mCs\|dTs\|5mCs\|5mCs\|5mCs\|dAs\|dGs\|o5mCs\|oAs\|oAs\|o5mCs\|oA] |
| 3076 | [oTs\|oGs\|oAp\|oTs\|o5mCs\|5mCs\|dTs\|dGs\|dTs\|dTs\|5mCs\|dTs\|5mCs\|5mCs\|5mCs\|dAs\|dGs\|o5mCs\|oAs\|oAs\|o5mCs\|oA] |
| 3077 | [oTs\|oGs\|oAs\|oTp\|o5mCs\|5mCs\|dTs\|dGs\|dTs\|dTs\|5mCs\|dTs\|5mCs\|5mCs\|5mCs\|dAs\|dGs\|o5mCs\|oAs\|oAs\|o5mCs\|oA] |
| 3078 | [oTs\|oGs\|oAp\|oTp\|o5mCs\|5mCs\|dTs\|dGs\|dTs\|dTs\|5mCs\|dTs\|5mCs\|5mCs\|5mCs\|dAs\|dGs\|o5mCs\|oAs\|oAs\|o5mCs\|oA] |
| 3079 | [oTs\|oGs\|oAs\|oTs\|o5mCs\|5mCs\|dTs\|dGs\|dTs\|dTs\|5mCs\|dTs\|5mCs\|5mCs\|5mCs\|dAs\|dGp\|o5mCs\|oAs\|oAs\|o5mCs\|oA] |
| 3080 | [oTs\|oGs\|oAs\|oTs\|o5mCs\|5mCs\|dTs\|dGs\|dTs\|dTs\|5mCs\|dTs\|5mCs\|5mCs\|5mCs\|dAp\|dGs\|o5mCs\|oAs\|oAs\|o5mCs\|oA] |
| 3081 | [oTs\|oGs\|oAs\|oTs\|o5mCs\|5mCs\|dTs\|dGs\|dTs\|dTs\|5mCs\|dTs\|5mCs\|5mCs\|5mCs\|dAp\|dGp\|o5mCs\|oAs\|oAs\|o5mCs\|oA] |
| 3082 | [oTs\|oGs\|oAp\|oTs\|o5mCs\|5mCs\|dTs\|dGs\|dTs\|dTs\|5mCs\|dTs\|5mCs\|5mCs\|5mCs\|dAs\|dGp\|o5mCs\|oAs\|oAs\|o5mCs\|oA] |
| 3083 | [oTs\|oGs\|oAp\|oTs\|o5mCs\|5mCs\|dTs\|dGs\|dTs\|dTs\|5mCs\|dTs\|5mCs\|5mCs\|5mCs\|dAp\|dGs\|o5mCs\|oAs\|oAs\|o5mCs\|oA] |
| 3084 | [oTs\|oGs\|oAs\|oTp\|o5mCs\|5mCs\|dTs\|dGs\|dTs\|dTs\|5mCs\|dTs\|5mCs\|5mCs\|5mCs\|dAs\|dGp\|o5mCs\|oAs\|oAs\|o5mCs\|oA] |
| 3085 | [oTs\|oGs\|oAs\|oTp\|o5mCs\|5mCs\|dTs\|dGs\|dTs\|dTs\|5mCs\|dTs\|5mCs\|5mCs\|5mCs\|dAp\|dGs\|o5mCs\|oAs\|oAs\|o5mCs\|oA] |
| 3086 | [oTs\|oGs\|oAp\|oTs\|o5mCs\|5mCs\|dTs\|dGs\|dTs\|dTs\|5mCs\|dTs\|5mCs\|5mCs\|5mCs\|dAp\|dGp\|o5mCs\|oAs\|oAs\|o5mCs\|oA] |
| 3087 | [oTs\|oGs\|oAs\|oTp\|o5mCs\|5mCs\|dTs\|dGs\|dTs\|dTs\|5mCs\|dTs\|5mCs\|5mCs\|5mCs\|dAp\|dGp\|o5mCs\|oAs\|oAs\|o5mCs\|oA] |
| 3088 | [oTs\|oGs\|oAp\|oTp\|o5mCs\|5mCs\|dTs\|dGs\|dTs\|dTs\|5mCs\|dTs\|5mCs\|5mCs\|5mCs\|dAs\|dGp\|o5mCs\|oAs\|oAs\|o5mCs\|oA] |
| 3089 | [oTs\|oGs\|oAp\|oTp\|o5mCs\|5mCs\|dTs\|dGs\|dTs\|dTs\|5mCs\|dTs\|5mCs\|5mCs\|5mCs\|dAp\|dGs\|o5mCs\|oAs\|oAs\|o5mCs\|oA] |
| 3090 | [oTs\|oGs\|oAp\|oTp\|o5mCs\|5mCs\|dTs\|dGs\|dTs\|dTs\|5mCs\|dTs\|5mCs\|5mCs\|5mCs\|dAp\|dGp\|o5mCs\|oAs\|oAs\|o5mCs\|oA] |
| 3091 | [oGs\|LAs\|oGs\|o5mCs\|oTs\|o5mCs\|oTs\|oTs\|dTs\|5mCs\|5mCs\|dAs\|5mCs\|5mCs\|5mCs\|dAs\|dTs\|dGs\|oTs\|oT] |
| 3092 | [oGs\|oAs\|LGs\|o5mCs\|oTs\|o5mCs\|oTs\|oTs\|dTs\|5mCs\|5mCs\|dAs\|5mCs\|5mCs\|5mCs\|dAs\|dTs\|dGs\|oTs\|oT] |
| 3093 | [oGs\|oAs\|oGs\|L5mCs\|oTs\|o5mCs\|oTs\|oTs\|dTs\|5mCs\|5mCs\|dAs\|5mCs\|5mCs\|5mCs\|dAs\|dTs\|dGs\|oTs\|oT] |
| 3094 | [oGs\|oAs\|oGs\|o5mCs\|LTs\|o5mCs\|oTs\|oTs\|dTs\|5mCs\|5mCs\|dAs\|5mCs\|5mCs\|5mCs\|dAs\|dTs\|dGs\|oTs\|oT] |
| 3095 | [oGs\|oAs\|oGs\|o5mCs\|oTs\|L5mCs\|oTs\|oTs\|dTs\|5mCs\|5mCs\|dAs\|5mCs\|5mCs\|5mCs\|dAs\|dTs\|dGs\|oTs\|oT] |
| 3096 | [oGs\|oAs\|oGs\|o5mCs\|oTs\|o5mCs\|LTs\|oTs\|dTs\|5mCs\|5mCs\|dAs\|5mCs\|5mCs\|5mCs\|dAs\|dTs\|dGs\|oTs\|oT] |
| 3097 | [oGs\|oAs\|dGs\|5mCs\|dTs\|5mCs\|dTs\|dTs\|dTs\|5mCs\|5mCs\|dAs\|o5mCs\|o5mCs\|o5mCs\|oAs\|oTs\|oGs\|LTs\|oT] |
| 3098 | [oGs\|oAs\|dGs\|5mCs\|dTs\|5mCs\|dTs\|dTs\|dTs\|5mCs\|5mCs\|dAs\|o5mCs\|o5mCs\|o5mCs\|oAs\|oTs\|LGs\|oTs\|oT] |
| 3099 | [oGs\|oAs\|dGs\|5mCs\|dTs\|5mCs\|dTs\|dTs\|dTs\|5mCs\|5mCs\|dAs\|o5mCs\|o5mCs\|o5mCs\|oAs\|LTs\|oGs\|oTs\|oT] |
| 3100 | [oGs\|oAs\|dGs\|5mCs\|dTs\|5mCs\|dTs\|dTs\|dTs\|5mCs\|5mCs\|dAs\|o5mCs\|o5mCs\|o5mCs\|LAs\|oTs\|oGs\|oTs\|oT] |
| 3101 | [oGs\|oAs\|dGs\|5mCs\|dTs\|5mCs\|dTs\|dTs\|dTs\|5mCs\|5mCs\|dAs\|o5mCs\|o5mCs\|L5mCs\|oAs\|oTs\|oGs\|oTs\|oT] |
| 3102 | [oGs\|oAs\|dGs\|5mCs\|dTs\|5mCs\|dTs\|dTs\|dTs\|5mCs\|5mCs\|dAs\|o5mCs\|L5mCs\|o5mCs\|oAs\|oTs\|oGs\|oTs\|oT] |
| 3103 | [oGs\|LAs\|oGs\|o5mCs\|oTs\|o5mCs\|oTs\|dTs\|dTs\|5mCs\|5mCs\|dAs\|5mCs\|5mCs\|5mCs\|dAs\|dTs\|oGs\|oTs\|oT] |
| 3104 | [oGs\|oAs\|LGs\|o5mCs\|oTs\|o5mCs\|oTs\|dTs\|dTs\|5mCs\|5mCs\|dAs\|5mCs\|5mCs\|5mCs\|dAs\|dTs\|oGs\|oTs\|oT] |
| 3105 | [oGs\|oAs\|oGs\|L5mCs\|oTs\|o5mCs\|oTs\|dTs\|dTs\|5mCs\|5mCs\|dAs\|5mCs\|5mCs\|5mCs\|dAs\|dTs\|oGs\|oTs\|oT] |
| 3106 | [oGs\|oAs\|oGs\|o5mCs\|LTs\|o5mCs\|oTs\|dTs\|dTs\|5mCs\|5mCs\|dAs\|5mCs\|5mCs\|5mCs\|dAs\|dTs\|oGs\|oTs\|oT] |
| 3107 | [oGs\|oAs\|oGs\|o5mCs\|oTs\|L5mCs\|oTs\|dTs\|dTs\|5mCs\|5mCs\|dAs\|5mCs\|5mCs\|5mCs\|dAs\|dTs\|oGs\|oTs\|oT] |
| 3108 | [oGs\|oAs\|oGs\|5mCs\|dTs\|5mCs\|dTs\|dTs\|dTs\|5mCs\|5mCs\|dAs\|5mCs\|o5mCs\|o5mCs\|oAs\|oTs\|oGs\|LTs\|oT] |
| 3109 | [oGs\|oAs\|oGs\|5mCs\|dTs\|5mCs\|dTs\|dTs\|dTs\|5mCs\|5mCs\|dAs\|5mCs\|o5mCs\|o5mCs\|oAs\|oTs\|LGs\|oTs\|oT] |
| 3110 | [oGs\|oAs\|oGs\|5mCs\|dTs\|5mCs\|dTs\|dTs\|dTs\|5mCs\|5mCs\|dAs\|5mCs\|o5mCs\|o5mCs\|oAs\|LTs\|oGs\|oTs\|oT] |
| 3111 | [oGs\|oAs\|oGs\|5mCs\|dTs\|5mCs\|dTs\|dTs\|dTs\|5mCs\|5mCs\|dAs\|5mCs\|o5mCs\|o5mCs\|LAs\|oTs\|oGs\|oTs\|oT] |
| 3112 | [oGs\|oAs\|oGs\|5mCs\|dTs\|5mCs\|dTs\|dTs\|dTs\|5mCs\|5mCs\|dAs\|5mCs\|o5mCs\|L5mCs\|oAs\|oTs\|oGs\|oTs\|oT] |
| 3113 | [oGs\|LAs\|oGs\|o5mCs\|oTs\|o5mCs\|oTs\|dTs\|dTs\|5mCs\|5mCs\|dAs\|5mCs\|5mCs\|5mCs\|dAs\|dTs\|oGs\|oT] |
| 3114 | [oGs\|oAs\|LGs\|o5mCs\|oTs\|o5mCs\|oTs\|dTs\|dTs\|5mCs\|5mCs\|dAs\|5mCs\|5mCs\|5mCs\|dAs\|dTs\|oGs\|oT] |
| 3115 | [oGs\|oAs\|oGs\|L5mCs\|oTs\|o5mCs\|oTs\|dTs\|dTs\|5mCs\|5mCs\|dAs\|5mCs\|5mCs\|5mCs\|dAs\|dTs\|oGs\|oT] |
| 3116 | [oGs\|oAs\|oGs\|o5mCs\|LTs\|o5mCs\|oTs\|dTs\|dTs\|5mCs\|5mCs\|dAs\|5mCs\|5mCs\|5mCs\|dAs\|dTs\|oGs\|oT] |
| 3117 | [oGs\|oAs\|oGs\|o5mCs\|oTs\|L5mCs\|oTs\|dTs\|dTs\|5mCs\|5mCs\|dAs\|5mCs\|5mCs\|5mCs\|dAs\|dTs\|oGs\|oT] |
| 3118 | [oAs\|oGs\|5mCs\|dTs\|5mCs\|dTs\|dTs\|dTs\|5mCs\|5mCs\|dAs\|5mCs\|o5mCs\|o5mCs\|oAs\|oTs\|oGs\|LTs\|oT] |
| 3119 | [oAs\|oGs\|5mCs\|dTs\|5mCs\|dTs\|dTs\|dTs\|5mCs\|5mCs\|dAs\|5mCs\|o5mCs\|o5mCs\|oAs\|oTs\|LGs\|oTs\|oT] |
| 3120 | [oAs\|oGs\|5mCs\|dTs\|5mCs\|dTs\|dTs\|dTs\|5mCs\|5mCs\|dAs\|5mCs\|o5mCs\|o5mCs\|oAs\|LTs\|oGs\|oTs\|oT] |
| 3121 | [oAs\|oGs\|5mCs\|dTs\|5mCs\|dTs\|dTs\|dTs\|5mCs\|5mCs\|dAs\|5mCs\|o5mCs\|o5mCs\|LAs\|oTs\|oGs\|oTs\|oT] |
| 3122 | [oAs\|oGs\|5mCs\|dTs\|5mCs\|dTs\|dTs\|dTs\|5mCs\|5mCs\|dAs\|5mCs\|o5mCs\|L5mCs\|oAs\|oTs\|oGs\|oTs\|oT] |
| 3123 | [oGs\|LAs\|oGs\|o5mCs\|oTs\|o5mCs\|dTs\|dTs\|dTs\|5mCs\|5mCs\|dAs\|5mCs\|5mCs\|5mCs\|dAs\|oTs\|oGs\|oTs\|oT] |
| 3124 | [oGs\|oAs\|LGs\|o5mCs\|oTs\|o5mCs\|dTs\|dTs\|dTs\|5mCs\|5mCs\|dAs\|5mCs\|5mCs\|5mCs\|dAs\|oTs\|oGs\|oTs\|oT] |
| 3125 | [oGs\|oAs\|oGs\|L5mCs\|oTs\|o5mCs\|dTs\|dTs\|dTs\|5mCs\|5mCs\|dAs\|5mCs\|5mCs\|5mCs\|dAs\|oTs\|oGs\|oTs\|oT] |
| 3126 | [oGs\|oAs\|oGs\|o5mCs\|LTs\|o5mCs\|dTs\|dTs\|dTs\|5mCs\|5mCs\|dAs\|5mCs\|5mCs\|5mCs\|dAs\|oTs\|oGs\|oTs\|oT] |
| 3127 | [oGs\|oAs\|oGs\|o5mCs\|dTs\|5mCs\|dTs\|dTs\|dTs\|5mCs\|5mCs\|dAs\|5mCs\|5mCs\|o5mCs\|oAs\|oTs\|oGs\|LTs\|oT] |
| 3128 | [oGs\|oAs\|oGs\|o5mCs\|dTs\|5mCs\|dTs\|dTs\|dTs\|5mCs\|5mCs\|dAs\|5mCs\|5mCs\|o5mCs\|oAs\|oTs\|LGs\|oTs\|oT] |
| 3129 | [oGs\|oAs\|oGs\|o5mCs\|dTs\|5mCs\|dTs\|dTs\|dTs\|5mCs\|5mCs\|dAs\|5mCs\|5mCs\|o5mCs\|oAs\|LTs\|oGs\|oTs\|oT] |
| 3130 | [oGs\|oAs\|oGs\|o5mCs\|dTs\|5mCs\|dTs\|dTs\|dTs\|5mCs\|5mCs\|dAs\|5mCs\|5mCs\|o5mCs\|LAs\|oTs\|oGs\|oTs\|oT] |
| 3131 | [oGs\|LAs\|oGs\|o5mCs\|oTs\|o5mCs\|dTs\|dTs\|dTs\|5mCs\|5mCs\|dAs\|5mCs\|5mCs\|5mCs\|dAs\|oTs\|oGs\|oT] |
| 3132 | [oGs\|oAs\|LGs\|o5mCs\|oTs\|o5mCs\|dTs\|dTs\|dTs\|5mCs\|5mCs\|dAs\|5mCs\|5mCs\|5mCs\|dAs\|oTs\|oGs\|oT] |
| 3133 | [oGs\|oAs\|oGs\|L5mCs\|oTs\|o5mCs\|dTs\|dTs\|dTs\|5mCs\|5mCs\|dAs\|5mCs\|5mCs\|5mCs\|dAs\|oTs\|oGs\|oT] |
| 3134 | [oGs\|oAs\|oGs\|o5mCs\|LTs\|o5mCs\|dTs\|dTs\|dTs\|5mCs\|5mCs\|dAs\|5mCs\|5mCs\|5mCs\|dAs\|oTs\|oGs\|oT] |
| 3135 | [oGs\|oAs\|oGs\|5mCs\|dTs\|5mCs\|dTs\|dTs\|dTs\|5mCs\|5mCs\|dAs\|5mCs\|5mCs\|o5mCs\|oAs\|oTs\|oGs\|LTs\|oT] |
| 3136 | [oGs\|oAs\|oGs\|5mCs\|dTs\|5mCs\|dTs\|dTs\|dTs\|5mCs\|5mCs\|dAs\|5mCs\|5mCs\|o5mCs\|oAs\|oTs\|LGs\|oTs\|oT] |
| 3137 | [oGs\|oAs\|oGs\|5mCs\|dTs\|5mCs\|dTs\|dTs\|dTs\|5mCs\|5mCs\|dAs\|5mCs\|5mCs\|o5mCs\|oAs\|LTs\|oGs\|oTs\|oT] |
| 3138 | [oGs\|LAs\|oGs\|o5mCs\|oTs\|o5mCs\|dTs\|dTs\|dTs\|5mCs\|5mCs\|dAs\|5mCs\|5mCs\|5mCs\|dAs\|oTs\|oG] |
| 3139 | [oGs\|oAs\|LGs\|o5mCs\|oTs\|o5mCs\|dTs\|dTs\|dTs\|5mCs\|5mCs\|dAs\|5mCs\|5mCs\|5mCs\|dAs\|oTs\|oG] |
| 3140 | [oGs\|oAs\|oGs\|L5mCs\|oTs\|o5mCs\|dTs\|dTs\|dTs\|5mCs\|5mCs\|dAs\|5mCs\|5mCs\|5mCs\|dAs\|oTs\|oG] |
| 3141 | [oGs\|oAs\|oGs\|o5mCs\|LTs\|o5mCs\|dTs\|dTs\|dTs\|5mCs\|5mCs\|dAs\|5mCs\|5mCs\|5mCs\|dAs\|oTs\|oG] |
| 3142 | [oGs\|o5mCs\|dTs\|5mCs\|dTs\|dTs\|dTs\|5mCs\|5mCs\|dAs\|5mCs\|5mCs\|o5mCs\|oAs\|oTs\|oGs\|LTs\|oT] |
| 3143 | [oGs\|o5mCs\|dTs\|5mCs\|dTs\|dTs\|dTs\|5mCs\|5mCs\|dAs\|5mCs\|5mCs\|o5mCs\|oAs\|oTsILGs\|oTs\|oT] |
| 3144 | [oGs\|o5mCs\|dTs\|5mCs\|dTs\|dTs\|dTs\|5mCs\|5mCs\|dAs\|5mCs\|5mCs\|o5mCs\|oAs\|LTs\|oGs\|oTs\|oT] |
| 3145 | [oGs\|o5mCs\|dTs\|5mCs\|dTs\|dTs\|dTs\|5mCs\|5mCs\|dAs\|5mCs\|5mCs\|o5mCs\|LAs\|oTs\|oGs\|oTs\|oT] |
| 3146 | [oGs\|LAs\|oGs\|o5mCs\|oTs\|5mCs\|dTs\|dTs\|dTs\|5mCs\|5mCs\|dAs\|5mCs\|5mCs\|5mCs\|oAs\|oTs\|oGs\|oTs\|oT] |
| 3147 | [oGs\|oAs\|LGs\|o5mCs\|oTs\|5mCs\|dTs\|dTs\|dTs\|5mCs\|5mCs\|dAs\|5mCs\|5mCs\|5mCs\|oAs\|oTs\|oGs\|oTs\|oT] |
| 3148 | [oGs\|oAs\|oGs\|L5mCs\|oTs\|5mCs\|dTs\|dTs\|dTs\|5mCs\|5mCs\|dAs\|5mCs\|5mCs\|5mCs\|oAs\|oTs\|oGs\|oTs\|oT] |
| 3149 | [oGs\|oAs\|oGs\|o5mCs\|oTs\|5mCs\|dTs\|dTs\|dTs\|5mCs\|5mCs\|dAs\|5mCs\|5mCs\|5mCs\|oAs\|oTs\|oGs\|LTs\|oT] |
| 3150 | [oGs\|oAs\|oGs\|o5mCs\|oTs\|5mCs\|dTs\|dTs\|dTs\|5mCs\|5mCs\|dAs\|5mCs\|5mCs\|5mCs\|oAs\|oTs\|LGs\|oTs\|oT] |
| 3151 | [oGs\|oAs\|oGs\|o5mCs\|oTs\|5mCs\|dTs\|dTs\|dTs\|5mCs\|5mCs\|dAs\|5mCs\|5mCs\|5mCs\|oAs\|LTs\|oGs\|oTs\|oT] |
| 3152 | [oGs\|LAs\|oGs\|o5mCs\|oTs\|5mCs\|dTs\|dTs\|dTs\|5mCs\|5mCs\|dAs\|5mCs\|5mCs\|5mCs\|oAs\|oTs\|oGs\|oT] |
| 3153 | [oGs\|oAs\|LGs\|o5mCs\|oTs\|5mCs\|dTs\|dTs\|dTs\|5mCs\|5mCs\|dAs\|5mCs\|5mCs\|5mCs\|oAs\|oTs\|oGs\|oT] |
| 3154 | [oGs\|oAs\|oGs\|L5mCs\|oTs\|5mCs\|dTs\|dTs\|dTs\|5mCs\|5mCs\|dAs\|5mCs\|5mCs\|5mCs\|oAs\|oTs\|oGs\|oT] |
| 3155 | [oAs\|oGs\|o5mCs\|oTs\|5mCs\|dTs\|dTs\|dTs\|5mCs\|5mCs\|dAs\|5mCs\|5mCs\|5mCs\|oAs\|oTs\|oGs\|LTs\|oT] |
| 3156 | [oAs\|oGs\|o5mCs\|oTs\|5mCs\|dTs\|dTs\|dTs\|5mCs\|5mCs\|dAs\|5mCs\|5mCs\|5mCs\|oAs\|oTs\|LGs\|oTs\|oT] |
| 3157 | [oAs\|oGs\|o5mCs\|oTs\|5mCs\|dTs\|dTs\|dTs\|5mCs\|5mCs\|dAs\|5mCs\|5mCs\|5mCs\|oAs\|LTs\|oGs\|oTs\|oT] |
| 3158 | [oGs\|LAs\|oGs\|o5mCs\|oTs\|5mCs\|dTs\|dTs\|dTs\|5mCs\|5mCs\|dAs\|5mCs\|5mCs\|5mCs\|oAs\|oTs\|oG] |
| 3159 | [oGs\|oAs\|LGs\|o5mCs\|oTs\|5mCs\|dTs\|dTs\|dTs\|5mCs\|5mCs\|dAs\|5mCs\|5mCs\|5mCs\|oAs\|oTs\|oG] |
| 3160 | [oGs\|oAs\|oGs\|L5mCs\|oTs\|5mCs\|dTs\|dTs\|dTs\|5mCs\|5mCs\|dAs\|5mCs\|5mCs\|5mCs\|oAs\|oTs\|oG] |
| 3161 | [oGs\|o5mCs\|oTs\|5mCs\|dTs\|dTs\|dTs\|5mCs\|5mCs\|dAs\|5mCs\|5mCs\|5mCs\|oAs\|oTs\|oGs\|LTs\|oT] |
| 3162 | [oGs\|o5mCs\|oTs\|5mCs\|dTs\|dTs\|dTs\|5mCs\|5mCs\|dAs\|5mCs\|5mCs\|5mCs\|oAs\|oTs\|LGs\|oTs\|oT] |
| 3163 | [oGs\|o5mCs\|oTs\|5mCs\|dTs\|dTs\|dTs\|5mCs\|5mCs\|dAs\|5mCs\|5mCs\|5mCs\|oAs\|LTs\|oGs\|oTs\|oT] |
| 3164 | [oGs\|LAs\|oGs\|o5mCs\|oTs\|5mCs\|dTs\|dTs\|dTs\|5mCs\|5mCs\|dAs\|5mCs\|5mCs\|5mCs\|oAs\|oT] |
| 3165 | [oGs\|oAs\|LGs\|o5mCs\|oTs\|5mCs\|dTs\|dTs\|dTs\|5mCs\|5mCs\|dAs\|5mCs\|5mCs\|5mCs\|oAs\|oT] |
| 3166 | [oGs\|oAs\|oGs\|L5mCs\|oTs\|5mCs\|dTs\|dTs\|dTs\|5mCs\|5mCs\|dAs\|5mCs\|5mCs\|5mCs\|oAs\|oT] |
| 3167 | [o5mCs\|oTs\|5mCs\|dTs\|dTs\|dTs\|5mCs\|5mCs\|dAs\|5mCs\|5mCs\|5mCs\|oAs\|oTs\|oGs\|LTs\|oT] |
| 3168 | [o5mCs\|oTs\|5mCs\|dTs\|dTs\|dTs\|5mCs\|5mCs\|dAs\|5mCs\|5mCs\|5mCs\|oAs\|oTs\|LGs\|oTs\|oT] |
| 3169 | [o5mCs\|oTs\|5mCs\|dTs\|dTs\|dTs\|5mCs\|5mCs\|dAs\|5mCs\|5mCs\|5mCs\|oAs\|LTs\|oGs\|oTs\|oT] |
| 3170 | [oAs\|LGs\|o5mCs\|oTs\|5mCs\|dTs\|dTs\|dTs\|5mCs\|5mCs\|dAs\|5mCs\|5mCs\|5mCs\|oAs\|oTs\|oGs\|oTs\|oT] |
| 3171 | [oAs\|oGs\|L5mCs\|oTs\|5mCs\|dTs\|dTs\|dTs\|5mCs\|5mCs\|dAs\|5mCs\|5mCs\|5mCs\|oAs\|oTs\|oGs\|oTs\|oT] |
| 3172 | [oGs\|oAs\|oGs\|o5mCs\|oTs\|5mCs\|dTs\|dTs\|dTs\|5mCs\|5mCs\|dAs\|5mCs\|5mCs\|5mCs\|oAs\|oTs\|LGs\|oT] |
| 3173 | [oGs\|oAs\|oGs\|o5mCs\|oTs\|5mCs\|dTs\|dTs\|dTs\|5mCs\|5mCs\|dAs\|5mCs\|5mCs\|5mCs\|oAs\|LTs\|oGs\|oT] |
| 3174 | [oAs\|LGs\|o5mCs\|oTs\|5mCs\|dTs\|dTs\|dTs\|5mCs\|5mCs\|dAs\|5mCs\|5mCs\|5mCs\|oAs\|oTs\|oGs\|oT] |
| 3175 | [oAs\|oGs\|L5mCs\|oTs\|5mCs\|dTs\|dTs\|dTs\|5mCs\|5mCs\|dAs\|5mCs\|5mCs\|5mCs\|oAs\|oTs\|oGs\|oT] |
| 3176 | [oAs\|oGs\|o5mCs\|oTs\|5mCs\|dTs\|dTs\|dTs\|5mCs\|5mCs\|dAs\|5mCs\|5mCs\|5mCs\|oAs\|oTs\|LGs\|oT] |
| 3177 | [oAs\|oGs\|o5mCs\|oTs\|5mCs\|dTs\|dTs\|dTs\|5mCs\|5mCs\|dAs\|5mCs\|5mCs\|5mCs\|oAs\|LTs\|oGs\|oT] |
| 3178 | [oAs\|LGs\|o5mCs\|oTs\|5mCs\|dTs\|dTs\|dTs\|5mCs\|5mCs\|dAs\|5mCs\|5mCs\|5mCs\|oAs\|oTs\|oG] |
| 3179 | [oAs\|oGs\|L5mCs\|oTs\|5mCs\|dTs\|dTs\|dTs\|5mCs\|5mCs\|dAs\|5mCs\|5mCs\|5mCs\|oAs\|oTs\|oG] |
| 3180 | [oAs\|oGs\|o5mCs\|oTs\|5mCs\|dTs\|dTs\|dTs\|5mCs\|5mCs\|dAs\|5mCs\|5mCs\|5mCs\|oAs\|LTs\|oG] |
| 3181 | [oGs\|oAs\|oGs\|o5mCs\|oTs\|o5mCs\|oTs\|oTs\|dTs\|5mCs\|5mCs\|dAs\|5mCs\|5mCs\|5mCs\|dAs\|dTs\|dGs\|oTs\|oT] |
| 3182 | [oGs\|oAs\|dGs\|5mCs\|dTs\|5mCs\|dTs\|dTs\|dTs\|5mCs\|5mCs\|dAs\|o5mCs\|o5mCs\|o5mCs\|oAs\|oTs\|oGs\|oTs\|oT] |
| 3183 | [oGs\|oAs\|oGs\|o5mCs\|oTs\|o5mCs\|oTs\|dTs\|dTs\|5mCs\|5mCs\|dAs\|5mCs\|5mCs\|5mCs\|dAs\|dTs\|oGs\|oTs\|oT] |
| 3184 | [oGs\|oAs\|oGs\|5mCs\|dTs\|5mCs\|dTs\|dTs\|dTs\|5mCs\|5mCs\|dAs\|5mCs\|o5mCs\|o5mCs\|oAs\|oTs\|oGs\|oTs\|oT] |
| 3185 | [oGs\|oAs\|oGs\|o5mCs\|oTs\|o5mCs\|oTs\|dTs\|dTs\|5mCs\|5mCs\|dAs\|5mCs\|5mCs\|5mCs\|dAs\|dTs\|oGs\|oT] |
| 3186 | [oAs\|oGs\|5mCs\|dTs\|5mCs\|dTs\|dTs\|dTs\|5mCs\|5mCs\|dAs\|5mCs\|o5mCs\|o5mCs\|oAs\|oTs\|oGs\|oTs\|oT] |
| 3187 | [oGs\|oAs\|oGs\|o5mCs\|oTs\|o5mCs\|dTs\|dTs\|dTs\|5mCs\|5mCs\|dAs\|5mCs\|5mCs\|5mCs\|dAs\|oTs\|oGs\|oTs\|oT] |
| 3188 | [oGs\|oAs\|oGs\|o5mCs\|dTs\|5mCs\|dTs\|dTs\|dTs\|5mCs\|5mCs\|dAs\|5mCs\|5mCs\|o5mCs\|oAs\|oTs\|oGs\|oTs\|oT] |
| 3189 | [oGs\|oAs\|oGs\|o5mCs\|oTs\|o5mCs\|dTs\|dTs\|dTs\|5mCs\|5mCs\|dAs\|5mCs\|5mCs\|5mCs\|dAs\|oTs\|oGs\|oT] |
| 3190 | [oGs\|oAs\|oGs\|5mCs\|dTs\|5mCs\|dTs\|dTs\|dTs\|5mCs\|5mCs\|dAs\|5mCs\|5mCs\|o5mCs\|oAs\|oTs\|oGs\|oTs\|oT] |
| 3191 | [oGs\|oAs\|oGs\|o5mCs\|oTs\|o5mCs\|dTs\|dTs\|dTs\|5mCs\|5mCs\|dAs\|5mCs\|5mCs\|5mCs\|dAs\|oTs\|oG] |
| 3192 | [oGs\|o5mCs\|dTs\|5mCs\|dTs\|dTs\|dTs\|5mCs\|5mCs\|dAs\|5mCs\|5mCs\|o5mCs\|oAs\|oTs\|oGs\|oTs\|oT] |
| 3193 | [oGs\|oAs\|oGs\|o5mCs\|oTs\|5mCs\|dTs\|dTs\|dTs\|5mCs\|5mCs\|dAs\|5mCs\|5mCs\|5mCs\|oAs\|oTs\|oGs\|oTs\|oT] |
| 3194 | [oGs\|oAs\|oGs\|o5mCs\|oTs\|5mCs\|dTs\|dTs\|dTs\|5mCs\|5mCs\|dAs\|5mCs\|5mCs\|5mCs\|oAs\|oTs\|oGs\|oT] |
| 3195 | [oGs\|oAs\|oGs\|o5mCs\|oTs\|5mCs\|dTs\|dTs\|dTs\|5mCs\|5mCs\|dAs\|5mCs\|5mCs\|5mCs\|oAs\|oTs\|oG] |
| 3196 | [oGs\|o5mCs\|oTs\|5mCs\|dTs\|dTs\|dTs\|5mCs\|5mCs\|dAs\|5mCs\|5mCs\|5mCs\|oAs\|oTs\|oGs\|oTs\|oT] |
| 3197 | [oGs\|oAs\|oGs\|o5mCs\|oTs\|5mCs\|dTs\|dTs\|dTs\|5mCs\|5mCs\|dAs\|5mCs\|5mCs\|5mCs\|oAs\|oT] |
| 3198 | [o5mCs\|oTs\|5mCs\|dTs\|dTs\|dTs\|5mCs\|5mCs\|dAs\|5mCs\|5mCs\|5mCs\|oAs\|oTs\|oGs\|oTs\|oT] |
| 3199 | [oAs\|oGs\|o5mCs\|oTs\|5mCs\|dTs\|dTs\|dTs\|5mCs\|5mCs\|dAs\|5mCs\|5mCs\|5mCs\|oAs\|oTs\|oGs\|oTs\|oT] |
| 3200 | [oAs\|oGs\|o5mCs\|oTs\|5mCs\|dTs\|dTs\|dTs\|5mCs\|5mCs\|dAs\|5mCs\|5mCs\|5mCs\|oAs\|oTs\|oGs\|oT] |
| 3201 | [oAs\|oGs\|o5mCs\|oTs\|5mCs\|dTs\|dTs\|dTs\|5mCs\|5mCs\|dAs\|5mCs\|5mCs\|5mCs\|oAs\|oTs\|oG] |
| 3202 | [oGs\|oAs\|oGp\|o5mCs\|oTs\|5mCs\|dTs\|dTs\|dTs\|5mCs\|5mCs\|dAs\|5mCs\|5mCs\|5mCs\|oAs\|oTs\|oGs\|oTs\|oT] |
| 3203 | [oGs\|oAs\|oGs\|o5mCp\|oTs\|5mCs\|dTs\|dTs\|dTs\|5mCs\|5mCs\|dAs\|5mCs\|5mCs\|5mCs\|oAs\|oTs\|oGs\|oTs\|oT] |
| 3204 | [oGs\|oAs\|oGp\|o5mCp\|oTs\|5mCs\|dTs\|dTs\|dTs\|5mCs\|5mCs\|dAs\|5mCs\|5mCs\|5mCs\|oAs\|oTs\|oGs\|oTs\|oT] |
| 3205 | [oGs\|oAs\|oGs\|o5mCs\|oTs\|5mCs\|dTs\|dTs\|dTs\|5mCs\|5mCs\|dAs\|5mCs\|5mCs\|5mCs\|oAs\|oTp\|oGs\|oTs\|oT] |
| 3206 | [oGs\|oAs\|oGs\|o5mCs\|oTs\|5mCs\|dTs\|dTs\|dTs\|5mCs\|5mCs\|dAs\|5mCs\|5mCs\|5mCs\|oAp\|oTs\|oGs\|oTs\|oT] |
| 3207 | [oGs\|oAs\|oGs\|o5mCs\|oTs\|5mCs\|dTs\|dTs\|dTs\|5mCs\|5mCs\|dAs\|5mCs\|5mCs\|5mCs\|oAp\|oTp\|oGs\|oTs\|oT] |
| 3208 | [oGs\|oAs\|oGp\|o5mCs\|oTs\|5mCs\|dTs\|dTs\|dTs\|5mCs\|5mCs\|dAs\|5mCs\|5mCs\|5mCs\|oAs\|oTp\|oGs\|oTs\|oT] |
| 3209 | [oGs\|oAs\|oGp\|o5mCs\|oTs\|5mCs\|dTs\|dTs\|dTs\|5mCs\|5mCs\|dAs\|5mCs\|5mCs\|5mCs\|oAp\|oTs\|oGs\|oTs\|oT] |
| 3210 | [oGs\|oAs\|oGs\|o5mCp\|oTs\|5mCs\|dTs\|dTs\|dTs\|5mCs\|5mCs\|dAs\|5mCs\|5mCs\|5mCs\|oAs\|oTp\|oGs\|oTs\|oT] |
| 3211 | [oGs\|oAs\|oGs\|o5mCp\|oTs\|5mCs\|dTs\|dTs\|dTs\|5mCs\|5mCs\|dAs\|5mCs\|5mCs\|5mCs\|oAp\|oTs\|oGs\|oTs\|oT] |
| 3212 | [oGs\|oAs\|oGp\|o5mCs\|oTs\|5mCs\|dTs\|dTs\|dTs\|5mCs\|5mCs\|dAs\|5mCs\|5mCs\|5mCs\|oAp\|oTp\|oGs\|oTs\|oT] |
| 3213 | [oGs\|oAs\|oGs\|o5mCp\|oTs\|5mCs\|dTs\|dTs\|dTs\|5mCs\|5mCs\|dAs\|5mCs\|5mCs\|5mCs\|oAp\|oTp\|oGs\|oTs\|oT] |
| 3214 | [oGs\|oAs\|oGp\|o5mCp\|oTs\|5mCs\|dTs\|dTs\|dTs\|5mCs\|5mCs\|dAs\|5mCs\|5mCs\|5mCs\|oAs\|oTp\|oGs\|oTs\|oT] |
| 3215 | [oGs\|oAs\|oGp\|o5mCp\|oTs\|5mCs\|dTs\|dTs\|dTs\|5mCs\|5mCs\|dAs\|5mCs\|5mCs\|5mCs\|oAp\|oTs\|oGs\|oTs\|oT] |
| 3216 | [oGs\|oAs\|oGp\|o5mCp\|oTs\|5mCs\|dTs\|dTs\|dTs\|5mCs\|5mCs\|dAs\|5mCs\|5mCs\|5mCs\|oAp\|oTp\|oGs\|oTs\|oT] |
| 3217 | [oGs\|oAs\|oGs\|o5mCs\|oTs\|5mCs\|dTs\|dTs\|dTs\|5mCs\|5mCs\|dAs\|5mCs\|5mCs\|5mCs\|oAs\|oTs\|oGs\|oTs\|oTs\|oT] |
| 3218 | [oGs\|oAs\|oGp\|o5mCs\|oTs\|5mCs\|dTs\|dTs\|dTs\|5mCs\|5mCs\|dAs\|5mCs\|5mCs\|5mCs\|oAs\|oTs\|oGs\|oTs\|oTs\|oT] |
| 3219 | [oGs\|oAs\|oGs\|o5mCp\|oTs\|5mCs\|dTs\|dTs\|dTs\|5mCs\|5mCs\|dAs\|5mCs\|5mCs\|5mCs\|oAs\|oTs\|oGs\|oTs\|oTs\|oT] |
| 3220 | [oGs\|oAs\|oGp\|o5mCp\|oTs\|5mCs\|dTs\|dTs\|dTs\|5mCs\|5mCs\|dAs\|5mCs\|5mCs\|5mCs\|oAs\|oTs\|oGs\|oTs\|oTs\|oT] |
| 3221 | [oGs\|oAs\|oGs\|o5mCs\|oTs\|5mCs\|dTs\|dTs\|dTs\|5mCs\|5mCs\|dAs\|5mCs\|5mCs\|5mCs\|oAs\|oTp\|oGs\|oTs\|oTs\|oT] |
| 3222 | [oGs\|oAs\|oGs\|o5mCs\|oTs\|5mCs\|dTs\|dTs\|dTs\|5mCs\|5mCs\|dAs\|5mCs\|5mCs\|5mCs\|oAp\|oTs\|oGs\|oTs\|oTs\|oT] |
| 3223 | [oGs\|oAs\|oGs\|o5mCs\|oTs\|5mCs\|dTs\|dTs\|dTs\|5mCs\|5mCs\|dAs\|5mCs\|5mCs\|5mCs\|oAp\|oTp\|oGs\|oTs\|oTs\|oT] |
| 3224 | [oGs\|oAs\|oGp\|o5mCs\|oTs\|5mCs\|dTs\|dTs\|dTs\|5mCs\|5mCs\|dAs\|5mCs\|5mCs\|5mCs\|oAs\|oTp\|oGs\|oTs\|oTs\|oT] |
| 3225 | [oGs\|oAs\|oGp\|o5mCs\|oTs\|5mCs\|dTs\|dTs\|dTs\|5mCs\|5mCs\|dAs\|5mCs\|5mCs\|5mCs\|oAp\|oTs\|oGs\|oTs\|oTs\|oT] |
| 3226 | [oGs\|oAs\|oGs\|o5mCp\|oTs\|5mCs\|dTs\|dTs\|dTs\|5mCs\|5mCs\|dAs\|5mCs\|5mCs\|5mCs\|oAs\|oTp\|oGs\|oTs\|oTs\|oT] |
| 3227 | [oGs\|oAs\|oGs\|o5mCp\|oTs\|5mCs\|dTs\|dTs\|dTs\|5mCs\|5mCs\|dAs\|5mCs\|5mCs\|5mCs\|oAp\|oTs\|oGs\|oTs\|oTs\|oT] |
| 3228 | [oGs\|oAs\|oGp\|o5mCs\|oTs\|5mCs\|dTs\|dTs\|dTs\|5mCs\|5mCs\|dAs\|5mCs\|5mCs\|5mCs\|oAp\|oTp\|oGs\|oTs\|oTs\|oT] |
| 3229 | [oGs\|oAs\|oGs\|o5mCp\|oTs\|5mCs\|dTs\|dTs\|dTs\|5mCs\|5mCs\|dAs\|5mCs\|5mCs\|5mCs\|oAp\|oTp\|oGs\|oTs\|oTs\|oT] |
| 3230 | [oGs\|oAs\|oGp\|o5mCp\|oTs\|5mCs\|dTs\|dTs\|dTs\|5mCs\|5mCs\|dAs\|5mCs\|5mCs\|5mCs\|oAs\|oTp\|oGs\|oTs\|oTs\|oT] |
| 3231 | [oGs\|oAs\|oGp\|o5mCp\|oTs\|5mCs\|dTs\|dTs\|dTs\|5mCs\|5mCs\|dAs\|5mCs\|5mCs\|5mCs\|oAp\|oTs\|oGs\|oTs\|oTs\|oT] |
| 3232 | [oGs\|oAs\|oGp\|o5mCp\|oTs\|5mCs\|dTs\|dTs\|dTs\|5mCs\|5mCs\|dAs\|5mCs\|5mCs\|5mCs\|oAp\|oTp\|oGs\|oTs\|oTs\|oT] |
| 3233 | [oGs\|oAs\|oGs\|o5mCs\|oTs\|5mCs\|dTs\|dTs\|dTs\|5mCs\|5mCs\|dAs\|5mCs\|5mCs\|5mCs\|oAs\|oTs\|oGs\|oTs\|oTs\|oTs\|oG] |
| 3234 | [oGs\|oAs\|oGp\|o5mCs\|oTs\|5mCs\|dTs\|dTs\|dTs\|5mCs\|5mCs\|dAs\|5mCs\|5mCs\|5mCs\|oAs\|oTs\|oGs\|oTs\|oTs\|oTs\|oG] |
| 3235 | [oGs\|oAs\|oGs\|o5mCp\|oTs\|5mCs\|dTs\|dTs\|dTs\|5mCs\|5mCs\|dAs\|5mCs\|5mCs\|5mCs\|oAs\|oTs\|oGs\|oTs\|oTs\|oTs\|oG] |
| 3236 | [oGs\|oAs\|oGp\|o5mCp\|oTs\|5mCs\|dTs\|dTs\|dTs\|5mCs\|5mCs\|dAs\|5mCs\|5mCs\|5mCs\|oAs\|oTs\|oGs\|oTs\|oTs\|oTs\|oG] |
| 3237 | [oGs\|oAs\|oGs\|o5mCs\|oTs\|5mCs\|dTs\|dTs\|dTs\|5mCs\|5mCs\|dAs\|5mCs\|5mCs\|5mCs\|oAs\|oTp\|oGs\|oTs\|oTs\|oTs\|oG] |
| 3238 | [oGs\|oAs\|oGs\|o5mCs\|oTs\|5mCs\|dTs\|dTs\|dTs\|5mCs\|5mCs\|dAs\|5mCs\|5mCs\|5mCs\|oAp\|oTs\|oGs\|oTs\|oTs\|oTs\|oG] |
| 3239 | [oGs\|oAs\|oGs\|o5mCs\|oTs\|5mCs\|dTs\|dTs\|dTs\|5mCs\|5mCs\|dAs\|5mCs\|5mCs\|5mCs\|oAp\|oTp\|oGs\|oTs\|oTs\|oTs\|oG] |
| 3240 | [oGs\|oAs\|oGp\|o5mCs\|oTs\|5mCs\|dTs\|dTs\|dTs\|5mCs\|5mCs\|dAs\|5mCs\|5mCs\|5mCs\|oAs\|oTp\|oGs\|oTs\|oTs\|oTs\|oG] |
| 3241 | [oGs\|oAs\|oGp\|o5mCs\|oTs\|5mCs\|dTs\|dTs\|dTs\|5mCs\|5mCs\|dAs\|5mCs\|5mCs\|5mCs\|oAp\|oTs\|oGs\|oTs\|oTs\|oTs\|oG] |
| 3242 | [oGs\|oAs\|oGs\|o5mCp\|oTs\|5mCs\|dTs\|dTs\|dTs\|5mCs\|5mCs\|dAs\|5mCs\|5mCs\|5mCs\|oAs\|oTp\|oGs\|oTs\|oTs\|oTs\|oG] |
| 3243 | [oGs\|oAs\|oGs\|o5mCp\|oTs\|5mCs\|dTs\|dTs\|dTs\|5mCs\|5mCs\|dAs\|5mCs\|5mCs\|5mCs\|oAp\|oTs\|oGs\|oTs\|oTs\|oTs\|oG] |
| 3244 | [oGs\|oAs\|oGp\|o5mCs\|oTs\|5mCs\|dTs\|dTs\|dTs\|5mCs\|5mCs\|dAs\|5mCs\|5mCs\|5mCs\|oAp\|oTp\|oGs\|oTs\|oTs\|oTs\|oG] |
| 3245 | [oGs\|oAs\|oGs\|o5mCp\|oTs\|5mCs\|dTs\|dTs\|dTs\|5mCs\|5mCs\|dAs\|5mCs\|5mCs\|5mCs\|oAp\|oTp\|oGs\|oTs\|oTs\|oTs\|oG] |
| 3246 | [oGs\|oAs\|oGp\|o5mCp\|oTs\|5mCs\|dTs\|dTs\|dTs\|5mCs\|5mCs\|dAs\|5mCs\|5mCs\|5mCs\|oAs\|oTp\|oGs\|oTs\|oTs\|oTs\|oG] |
| 3247 | [oGs\|oAs\|oGp\|o5mCp\|oTs\|5mCs\|dTs\|dTs\|dTs\|5mCs\|5mCs\|dAs\|5mCs\|5mCs\|5mCs\|oAp\|oTs\|oGs\|oTs\|oTs\|oTs\|oG] |
| 3248 | [oGs\|oAs\|oGp\|o5mCp\|oTs\|5mCs\|dTs\|dTs\|dTs\|5mCs\|5mCs\|dAs\|5mCs\|5mCs\|5mCs\|oAp\|oTp\|oGs\|oTs\|oTs\|oTs\|oG] |
| 3249 | [oGs\|oAs\|oGs\|o5mCs\|oTs\|5mCs\|dTs\|dTs\|dTs\|5mCs\|5mCs\|dAs\|5mCs\|5mCs\|5mCs\|oAs\|oTs\|oGs\|oTs\|oTs\|oTs\|oGs\|oG] |
| 3250 | [oGs\|oAs\|oGp\|o5mCs\|oTs\|5mCs\|dTs\|dTs\|dTs\|5mCs\|5mCs\|dAs\|5mCs\|5mCs\|5mCs\|oAs\|oTs\|oGs\|oTs\|oTs\|oTs\|oGs\|oG] |
| 3251 | [oGs\|oAs\|oGs\|o5mCp\|oTs\|5mCs\|dTs\|dTs\|dTs\|5mCs\|5mCs\|dAs\|5mCs\|5mCs\|5mCs\|oAs\|oTs\|oGs\|oTs\|oTs\|oTs\|oGs\|oG] |
| 3252 | [oGs\|oAs\|oGp\|o5mCp\|oTs\|5mCs\|dTs\|dTs\|dTs\|5mCs\|5mCs\|dAs\|5mCs\|5mCs\|5mCs\|oAs\|oTs\|oGs\|oTs\|oTs\|oTs\|oGs\|oG] |
| 3253 | [oGs\|oAs\|oGs\|o5mCs\|oTs\|5mCs\|dTs\|dTs\|dTs\|5mCs\|5mCs\|dAs\|5mCs\|5mCs\|5mCs\|oAs\|oTp\|oGs\|oTs\|oTs\|oTs\|oGs\|oG] |
| 3254 | [oGs\|oAs\|oGs\|o5mCs\|oTs\|5mCs\|dTs\|dTs\|dTs\|5mCs\|5mCs\|dAs\|5mCs\|5mCs\|5mCs\|oAp\|oTs\|oGs\|oTs\|oTs\|oTs\|oGs\|oG] |
| 3255 | [oGs\|oAs\|oGs\|o5mCs\|oTs\|5mCs\|dTs\|dTs\|dTs\|5mCs\|5mCs\|dAs\|5mCs\|5mCs\|5mCs\|oAp\|oTp\|oGs\|oTs\|oTs\|oTs\|oGs\|oG] |
| 3256 | [oGs\|oAs\|oGp\|o5mCs\|oTs\|5mCs\|dTs\|dTs\|dTs\|5mCs\|5mCs\|dAs\|5mCs\|5mCs\|5mCs\|oAs\|oTp\|oGs\|oTs\|oTs\|oTs\|oGs\|oG] |
| 3257 | [oGs\|oAs\|oGp\|o5mCs\|oTs\|5mCs\|dTs\|dTs\|dTs\|5mCs\|5mCs\|dAs\|5mCs\|5mCs\|5mCs\|oAp\|oTs\|oGs\|oTs\|oTs\|oTs\|oGs\|oG] |
| 3258 | [oGs\|oAs\|oGs\|o5mCp\|oTs\|5mCs\|dTs\|dTs\|dTs\|5mCs\|5mCs\|dAs\|5mCs\|5mCs\|5mCs\|oAs\|oTp\|oGs\|oTs\|oTs\|oTs\|oGs\|oG] |
| 3259 | [oGs\|oAs\|oGs\|o5mCp\|oTs\|5mCs\|dTs\|dTs\|dTs\|5mCs\|5mCs\|dAs\|5mCs\|5mCs\|5mCs\|oAp\|oTs\|oGs\|oTs\|oTs\|oTs\|oGs\|oG] |
| 3260 | [oGs\|oAs\|oGp\|o5mCs\|oTs\|5mCs\|dTs\|dTs\|dTs\|5mCs\|5mCs\|dAs\|5mCs\|5mCs\|5mCs\|oAp\|oTp\|oGs\|oTs\|oTs\|oTs\|oGs\|oG] |
| 3261 | [oGs\|oAs\|oGs\|o5mCp\|oTs\|5mCs\|dTs\|dTs\|dTs\|5mCs\|5mCs\|dAs\|5mCs\|5mCs\|5mCs\|oAp\|oTp\|oGs\|oTs\|oTs\|oTs\|oGs\|oG] |
| 3262 | [oGs\|oAs\|oGp\|o5mCp\|oTs\|5mCs\|dTs\|dTs\|dTs\|5mCs\|5mCs\|dAs\|5mCs\|5mCs\|5mCs\|oAs\|oTp\|oGs\|oTs\|oTs\|oTs\|oGs\|oG] |
| 3263 | [oGs\|oAs\|oGp\|o5mCp\|oTs\|5mCs\|dTs\|dTs\|dTs\|5mCs\|5mCs\|dAs\|5mCs\|5mCs\|5mCs\|oAp\|oTs\|oGs\|oTs\|oTs\|oTs\|oGs\|oG] |
| 3264 | [oGs\|oAs\|oGp\|o5mCp\|oTs\|5mCs\|dTs\|dTs\|dTs\|5mCs\|5mCs\|dAs\|5mCs\|5mCs\|5mCs\|oAp\|oTp\|oGs\|oTs\|oTs\|oTs\|oGs\|oG] |
| 3265 | [oGs\|oAs\|oGs\|o5mCs\|oTs\|5mCs\|dTs\|dTs\|dTs\|5mCs\|5mCs\|dAs\|5mCs\|5mCs\|5mCs\|dAs\|oTs\|oGs\|oTs\|oTs\|oT] |
| 3266 | [oGs\|oAs\|oGp\|o5mCs\|oTs\|5mCs\|dTs\|dTs\|dTs\|5mCs\|5mCs\|dAs\|5mCs\|5mCs\|5mCs\|dAs\|oTs\|oGs\|oTs\|oTs\|oT] |
| 3267 | [oGs\|oAs\|oGs\|o5mCp\|oTs\|5mCs\|dTs\|dTs\|dTs\|5mCs\|5mCs\|dAs\|5mCs\|5mCs\|5mCs\|dAs\|oTs\|oGs\|oTs\|oTs\|oT] |
| 3268 | [oGs\|oAs\|oGp\|o5mCp\|oTs\|5mCs\|dTs\|dTs\|dTs\|5mCs\|5mCs\|dAs\|5mCs\|5mCs\|5mCs\|dAs\|oTs\|oGs\|oTs\|oTs\|oT] |
| 3269 | [oGs\|oAs\|oGs\|o5mCs\|oTs\|5mCs\|dTs\|dTs\|dTs\|5mCs\|5mCs\|dAs\|5mCs\|5mCs\|5mCs\|dAs\|oTp\|oGs\|oTs\|oTs\|oT] |
| 3270 | [oGs\|oAs\|oGs\|o5mCs\|oTs\|5mCs\|dTs\|dTs\|dTs\|5mCs\|5mCs\|dAs\|5mCs\|5mCs\|5mCs\|dAp\|oTs\|oGs\|oTs\|oTs\|oT] |
| 3271 | [oGs\|oAs\|oGs\|o5mCs\|oTs\|5mCs\|dTs\|dTs\|dTs\|5mCs\|5mCs\|dAs\|5mCs\|5mCs\|5mCs\|dAp\|oTp\|oGs\|oTs\|oTs\|oT] |
| 3272 | [oGs\|oAs\|oGp\|o5mCs\|oTs\|5mCs\|dTs\|dTs\|dTs\|5mCs\|5mCs\|dAs\|5mCs\|5mCs\|5mCs\|dAs\|oTp\|oGs\|oTs\|oTs\|oT] |
| 3273 | [oGs\|oAs\|oGp\|o5mCs\|oTs\|5mCs\|dTs\|dTs\|dTs\|5mCs\|5mCs\|dAs\|5mCs\|5mCs\|5mCs\|dAp\|oTs\|oGs\|oTs\|oTs\|oT] |
| 3274 | [oGs\|oAs\|oGs\|o5mCp\|oTs\|5mCs\|dTs\|dTs\|dTs\|5mCs\|5mCs\|dAs\|5mCs\|5mCs\|5mCs\|dAs\|oTp\|oGs\|oTs\|oTs\|oT] |
| 3275 | [oGs\|oAs\|oGs\|o5mCp\|oTs\|5mCs\|dTs\|dTs\|dTs\|5mCs\|5mCs\|dAs\|5mCs\|5mCs\|5mCs\|dAp\|oTs\|oGs\|oTs\|oTs\|oT] |
| 3276 | [oGs\|oAs\|oGp\|o5mCs\|oTs\|5mCs\|dTs\|dTs\|dTs\|5mCs\|5mCs\|dAs\|5mCs\|5mCs\|5mCs\|dAp\|oTp\|oGs\|oTs\|oTs\|oT] |
| 3277 | [oGs\|oAs\|oGs\|o5mCp\|oTs\|5mCs\|dTs\|dTs\|dTs\|5mCs\|5mCs\|dAs\|5mCs\|5mCs\|5mCs\|dAp\|oTp\|oGs\|oTs\|oTs\|oT] |
| 3278 | [oGs\|oAs\|oGp\|o5mCp\|oTs\|5mCs\|dTs\|dTs\|dTs\|5mCs\|5mCs\|dAs\|5mCs\|5mCs\|5mCs\|dAs\|oTp\|oGs\|oTs\|oTs\|oT] |
| 3279 | [oGs\|oAs\|oGp\|o5mCp\|oTs\|5mCs\|dTs\|dTs\|dTs\|5mCs\|5mCs\|dAs\|5mCs\|5mCs\|5mCs\|dAp\|oTs\|oGs\|oTs\|oTs\|oT] |
| 3280 | [oGs\|oAs\|oGp\|o5mCp\|oTs\|5mCs\|dTs\|dTs\|dTs\|5mCs\|5mCs\|dAs\|5mCs\|5mCs\|5mCs\|dAp\|oTp\|oGs\|oTs\|oTs\|oT] |
| 3281 | [oGs\|oAs\|oGs\|o5mCs\|oTs\|5mCs\|dTs\|dTs\|dTs\|5mCs\|5mCs\|dAs\|5mCs\|5mCs\|5mCs\|dAs\|dTs\|oGs\|oTs\|oTs\|oTs\|oG] |
| 3282 | [oGs\|oAs\|oGp\|o5mCs\|oTs\|5mCs\|dTs\|dTs\|dTs\|5mCs\|5mCs\|dAs\|5mCs\|5mCs\|5mCs\|dAs\|dTs\|oGs\|oTs\|oTs\|oTs\|oG] |
| 3283 | [oGs\|oAs\|oGs\|o5mCp\|oTs\|5mCs\|dTs\|dTs\|dTs\|5mCs\|5mCs\|dAs\|5mCs\|5mCs\|5mCs\|dAs\|dTs\|oGs\|oTs\|oTs\|oTs\|oG] |
| 3284 | [oGs\|oAs\|oGp\|o5mCp\|oTs\|5mCs\|dTs\|dTs\|dTs\|5mCs\|5mCs\|dAs\|5mCs\|5mCs\|5mCs\|dAs\|dTs\|oGs\|oTs\|oTs\|oTs\|oG] |
| 3285 | [oGs\|oAs\|oGs\|o5mCs\|oTs\|5mCs\|dTs\|dTs\|dTs\|5mCs\|5mCs\|dAs\|5mCs\|5mCs\|5mCs\|dAs\|dTp\|oGs\|oTs\|oTs\|oTs\|oG] |
| 3286 | [oGs\|oAs\|oGs\|o5mCs\|oTs\|5mCs\|dTs\|dTs\|dTs\|5mCs\|5mCs\|dAs\|5mCs\|5mCs\|5mCs\|dAp\|dTs\|oGs\|oTs\|oTs\|oTs\|oG] |
| 3287 | [oGs\|oAs\|oGs\|o5mCs\|oTs\|5mCs\|dTs\|dTs\|dTs\|5mCs\|5mCs\|dAs\|5mCs\|5mCs\|5mCs\|dAp\|dTp\|oGs\|oTs\|oTs\|oTs\|oG] |
| 3288 | [oGs\|oAs\|oGp\|o5mCs\|oTs\|5mCs\|dTs\|dTs\|dTs\|5mCs\|5mCs\|dAs\|5mCs\|5mCs\|5mCs\|dAs\|dTp\|oGs\|oTs\|oTs\|oTs\|oG] |
| 3289 | [oGs\|oAs\|oGp\|o5mCs\|oTs\|5mCs\|dTs\|dTs\|dTs\|5mCs\|5mCs\|dAs\|5mCs\|5mCs\|5mCs\|dAp\|dTs\|oGs\|oTs\|oTs\|oTs\|oG] |
| 3290 | [oGs\|oAs\|oGs\|o5mCp\|oTs\|5mCs\|dTs\|dTs\|dTs\|5mCs\|5mCs\|dAs\|5mCs\|5mCs\|5mCs\|dAs\|dTp\|oGs\|oTs\|oTs\|oTs\|oG] |
| 3291 | [oGs\|oAs\|oGs\|o5mCp\|oTs\|5mCs\|dTs\|dTs\|dTs\|5mCs\|5mCs\|dAs\|5mCs\|5mCs\|5mCs\|dAp\|dTs\|oGs\|oTs\|oTs\|oTs\|oG] |
| 3292 | [oGs\|oAs\|oGp\|o5mCs\|oTs\|5mCs\|dTs\|dTs\|dTs\|5mCs\|5mCs\|dAs\|5mCs\|5mCs\|5mCs\|dAp\|dTp\|oGs\|oTs\|oTs\|oTs\|oG] |
| 3293 | [oGs\|oAs\|oGs\|o5mCp\|oTs\|5mCs\|dTs\|dTs\|dTs\|5mCs\|5mCs\|dAs\|5mCs\|5mCs\|5mCs\|dAp\|dTp\|oGs\|oTs\|oTs\|oTs\|oG] |
| 3294 | [oGs\|oAs\|oGp\|o5mCp\|oTs\|5mCs\|dTs\|dTs\|dTs\|5mCs\|5mCs\|dAs\|5mCs\|5mCs\|5mCs\|dAs\|dTp\|oGs\|oTs\|oTs\|oTs\|oG] |
| 3295 | [oGs\|oAs\|oGp\|o5mCp\|oTs\|5mCs\|dTs\|dTs\|dTs\|5mCs\|5mCs\|dAs\|5mCs\|5mCs\|5mCs\|dAp\|dTs\|oGs\|oTs\|oTs\|oTs\|oG] |
| 3296 | [oGs\|oAs\|oGp\|o5mCp\|oTs\|5mCs\|dTs\|dTs\|dTs\|5mCs\|5mCs\|dAs\|5mCs\|5mCs\|5mCs\|dAp\|dTp\|oGs\|oTs\|oTs\|oTs\|oG] |
| 3297 | [oGs\|LGs\|oAs\|oGs\|o5mCs\|oTs\|o5mCs\|oTs\|dTs\|dTs\|5mCs\|5mCs\|dAs\|5mCs\|5mCs\|5mCs\|dAs\|dTs\|oGs\|oT] |
| 3298 | [oGs\|oGs\|LAs\|oGs\|o5mCs\|oTs\|o5mCs\|oTs\|dTs\|dTs\|5mCs\|5mCs\|dAs\|5mCs\|5mCs\|5mCs\|dAs\|dTs\|oGs\|oT] |
| 3299 | [oGs\|oGs\|oAs\|LGs\|o5mCs\|oTs\|o5mCs\|oTs\|dTs\|dTs\|5mCs\|5mCs\|dAs\|5mCs\|5mCs\|5mCs\|dAs\|dTs\|oGs\|oT] |
| 3300 | [oGs\|oGs\|oAs\|oGs\|L5mCs\|oTs\|o5mCs\|oTs\|dTs\|dTs\|5mCs\|5mCs\|dAs\|5mCs\|5mCs\|5mCs\|dAs\|dTs\|oGs\|oT] |
| 3301 | [oGs\|oGs\|oAs\|oGs\|o5mCs\|LTs\|o5mCs\|oTs\|dTs\|dTs\|5mCs\|5mCs\|dAs\|5mCs\|5mCs\|5mCs\|dAs\|dTs\|oGs\|oT] |
| 3302 | [oGs\|oGs\|oAs\|oGs\|o5mCs\|oTs\|L5mCs\|oTs\|dTs\|dTs\|5mCs\|5mCs\|dAs\|5mCs\|5mCs\|5mCs\|dAs\|dTs\|oGs\|oT] |
| 3303 | [oGs\|oGs\|dAs\|dGs\|5mCs\|dTs\|5mCs\|dTs\|dTs\|dTs\|5mCs\|5mCs\|oAs\|o5mCs\|o5mCs\|o5mCs\|oAs\|oTs\|LGs\|oT] |
| 3304 | [oGs\|oGs\|dAs\|dGs\|5mCs\|dTs\|5mCs\|dTs\|dTs\|dTs\|5mCs\|5mCs\|oAs\|o5mCs\|o5mCs\|o5mCs\|oAs\|LTs\|oGs\|oT] |
| 3305 | [oGs\|oGs\|dAs\|dGs\|5mCs\|dTs\|5mCs\|dTs\|dTs\|dTs\|5mCs\|5mCs\|oAs\|o5mCs\|o5mCs\|o5mCs\|LAs\|oTs\|oGs\|oT] |
| 3306 | [oGs\|oGs\|dAs\|dGs\|5mCs\|dTs\|5mCs\|dTs\|dTs\|dTs\|5mCs\|5mCs\|oAs\|o5mCs\|o5mCs\|L5mCs\|oAs\|oTs\|oGs\|oT] |
| 3307 | [oGs\|oGs\|dAs\|dGs\|5mCs\|dTs\|5mCs\|dTs\|dTs\|dTs\|5mCs\|5mCs\|oAs\|o5mCs\|L5mCs\|o5mCs\|oAs\|oTs\|oGs\|oT] |
| 3308 | [oGs\|oGs\|dAs\|dGs\|5mCs\|dTs\|5mCs\|dTs\|dTs\|dTs\|5mCs\|5mCs\|oAs\|L5mCs\|o5mCs\|o5mCs\|oAs\|oTs\|oGs\|oT] |
| 3309 | [oGs\|LGs\|oAs\|oGs\|o5mCs\|oTs\|o5mCs\|dTs\|dTs\|dTs\|5mCs\|5mCs\|dAs\|5mCs\|5mCs\|5mCs\|dAs\|oTs\|oGs\|oT] |
| 3310 | [oGs\|oGs\|LAs\|oGs\|o5mCs\|oTs\|o5mCs\|dTs\|dTs\|dTs\|5mCs\|5mCs\|dAs\|5mCs\|5mCs\|5mCs\|dAs\|oTs\|oGs\|oT] |
| 3311 | [oGs\|oGs\|oAs\|LGs\|o5mCs\|oTs\|o5mCs\|dTs\|dTs\|dTs\|5mCs\|5mCs\|dAs\|5mCs\|5mCs\|5mCs\|dAs\|oTs\|oGs\|oT] |
| 3312 | [oGs\|oGs\|oAs\|oGs\|L5mCs\|oTs\|o5mCs\|dTs\|dTs\|dTs\|5mCs\|5mCs\|dAs\|5mCs\|5mCs\|5mCs\|dAs\|oTs\|oGs\|oT] |
| 3313 | [oGs\|oGs\|oAs\|oGs\|o5mCs\|LTs\|o5mCs\|dTs\|dTs\|dTs\|5mCs\|5mCs\|dAs\|5mCs\|5mCs\|5mCs\|dAs\|oTs\|oGs\|oT] |
| 3314 | [oGs\|oGs\|oAs\|dGs\|5mCs\|dTs\|5mCs\|dTs\|dTs\|dTs\|5mCs\|5mCs\|dAs\|o5mCs\|o5mCs\|o5mCs\|oAs\|oTs\|LGs\|oT] |
| 3315 | [oGs\|oGs\|oAs\|dGs\|5mCs\|dTs\|5mCs\|dTs\|dTs\|dTs\|5mCs\|5mCs\|dAs\|o5mCs\|o5mCs\|o5mCs\|oAs\|LTs\|oGs\|oT] |
| 3316 | [oGs\|oGs\|oAs\|dGs\|5mCs\|dTs\|5mCs\|dTs\|dTs\|dTs\|5mCs\|5mCs\|dAs\|o5mCs\|o5mCs\|o5mCs\|LAs\|oTs\|oGs\|oT] |
| 3317 | [oGs\|oGs\|oAs\|dGs\|5mCs\|dTs\|5mCs\|dTs\|dTs\|dTs\|5mCs\|5mCs\|dAs\|o5mCs\|o5mCs\|L5mCs\|oAs\|oTs\|oGs\|oT] |
| 3318 | [oGs\|oGs\|oAs\|dGs\|5mCs\|dTs\|5mCs\|dTs\|dTs\|dTs\|5mCs\|5mCs\|dAs\|o5mCs\|L5mCs\|o5mCs\|oAs\|oTs\|oGs\|oT] |
| 3319 | [oGs\|LGs\|oAs\|oGs\|o5mCs\|oTs\|o5mCs\|dTs\|dTs\|dTs\|5mCs\|5mCs\|dAs\|5mCs\|5mCs\|5mCs\|dAs\|oTs\|oG] |
| 3320 | [oGs\|oGs\|LAs\|oGs\|o5mCs\|oTs\|o5mCs\|dTs\|dTs\|dTs\|5mCs\|5mCs\|dAs\|5mCs\|5mCs\|5mCs\|dAs\|oTs\|oG] |
| 3321 | [oGs\|oGs\|oAs\|LGs\|o5mCs\|oTs\|o5mCs\|dTs\|dTs\|dTs\|5mCs\|5mCs\|dAs\|5mCs\|5mCs\|5mCs\|dAs\|oTs\|oG] |
| 3322 | [oGs\|oGs\|oAs\|oGs\|L5mCs\|oTs\|o5mCs\|dTs\|dTs\|dTs\|5mCs\|5mCs\|dAs\|5mCs\|5mCs\|5mCs\|dAs\|oTs\|oG] |
| 3323 | [oGs\|oGs\|oAs\|oGs\|o5mCs\|LTs\|o5mCs\|dTs\|dTs\|dTs\|5mCs\|5mCs\|dAs\|5mCs\|5mCs\|5mCs\|dAs\|oTs\|oG] |
| 3324 | [oGs\|oAs\|dGs\|5mCs\|dTs\|5mCs\|dTs\|dTs\|dTs\|5mCs\|5mCs\|dAs\|o5mCs\|o5mCs\|o5mCs\|oAs\|oTs\|LGs\|oT] |
| 3325 | [oGs\|oAs\|dGs\|5mCs\|dTs\|5mCs\|dTs\|dTs\|dTs\|5mCs\|5mCs\|dAs\|o5mCs\|o5mCs\|o5mCs\|oAs\|LTs\|oGs\|oT] |
| 3326 | [oGs\|oAs\|dGs\|5mCs\|dTs\|5mCs\|dTs\|dTs\|dTs\|5mCs\|5mCs\|dAs\|o5mCs\|o5mCs\|o5mCs\|LAs\|oTs\|oGs\|oT] |
| 3327 | [oGs\|oAs\|dGs\|5mCs\|dTs\|5mCs\|dTs\|dTs\|dTs\|5mCs\|5mCs\|dAs\|o5mCs\|o5mCs\|L5mCs\|oAs\|oTs\|oGs\|oT] |
| 3328 | [oGs\|oAs\|dGs\|5mCs\|dTs\|5mCs\|dTs\|dTs\|dTs\|5mCs\|5mCs\|dAs\|o5mCs\|L5mCs\|o5mCs\|oAs\|oTs\|oGs\|oT] |
| 3329 | [oGs\|LGs\|oAs\|oGs\|o5mCs\|oTs\|5mCs\|dTs\|dTs\|dTs\|5mCs\|5mCs\|dAs\|5mCs\|5mCs\|5mCs\|oAs\|oTs\|oGs\|oT] |
| 3330 | [oGs\|oGs\|LAs\|oGs\|o5mCs\|oTs\|5mCs\|dTs\|dTs\|dTs\|5mCs\|5mCs\|dAs\|5mCs\|5mCs\|5mCs\|oAs\|oTs\|oGs\|oT] |
| 3331 | [oGs\|oGs\|oAs\|LGs\|o5mCs\|oTs\|5mCs\|dTs\|dTs\|dTs\|5mCs\|5mCs\|dAs\|5mCs\|5mCs\|5mCs\|oAs\|oTs\|oGs\|oT] |
| 3332 | [oGs\|oGs\|oAs\|oGs\|L5mCs\|oTs\|5mCs\|dTs\|dTs\|dTs\|5mCs\|5mCs\|dAs\|5mCs\|5mCs\|5mCs\|oAs\|oTs\|oGs\|oT] |
| 3333 | [oGs\|oGs\|oAs\|oGs\|5mCs\|dTs\|5mCs\|dTs\|dTs\|dTs\|5mCs\|5mCs\|dAs\|5mCs\|o5mCs\|o5mCs\|oAs\|oTs\|LGs\|oT] |
| 3334 | [oGs\|oGs\|oAs\|oGs\|5mCs\|dTs\|5mCs\|dTs\|dTs\|dTs\|5mCs\|5mCs\|dAs\|5mCs\|o5mCs\|o5mCs\|oAs\|LTs\|oGs\|oT] |
| 3335 | [oGs\|oGs\|oAs\|oGs\|5mCs\|dTs\|5mCs\|dTs\|dTs\|dTs\|5mCs\|5mCs\|dAs\|5mCs\|o5mCs\|o5mCs\|LAs\|oTs\|oGs\|oT] |
| 3336 | [oGs\|oGs\|oAs\|oGs\|5mCs\|dTs\|5mCs\|dTs\|dTs\|dTs\|5mCs\|5mCs\|dAs\|5mCs\|o5mCs\|L5mCs\|oAs\|oTs\|oGs\|oT] |
| 3337 | [oGs\|LGs\|oAs\|oGs\|o5mCs\|oTs\|5mCs\|dTs\|dTs\|dTs\|5mCs\|5mCs\|dAs\|5mCs\|5mCs\|5mCs\|oAs\|oTs\|oG] |
| 3338 | [oGs\|oGs\|LAs\|oGs\|o5mCs\|oTs\|5mCs\|dTs\|dTs\|dTs\|5mCs\|5mCs\|dAs\|5mCs\|5mCs\|5mCs\|oAs\|oTs\|oG] |
| 3339 | [oGs\|oGs\|oAs\|LGs\|o5mCs\|oTs\|5mCs\|dTs\|dTs\|dTs\|5mCs\|5mCs\|dAs\|5mCs\|5mCs\|5mCs\|oAs\|oTs\|oG] |
| 3340 | [oGs\|oGs\|oAs\|oGs\|L5mCs\|oTs\|5mCs\|dTs\|dTs\|dTs\|5mCs\|5mCs\|dAs\|5mCs\|5mCs\|5mCs\|oAs\|oTs\|oG] |
| 3341 | [oGs\|oGs\|oAs\|dGs\|5mCs\|dTs\|5mCs\|dTs\|dTs\|dTs\|5mCs\|5mCs\|dAs\|5mCs\|o5mCs\|o5mCs\|oAs\|oTs\|LGs\|oT] |
| 3342 | [oGs\|oGs\|oAs\|dGs\|5mCs\|dTs\|5mCs\|dTs\|dTs\|dTs\|5mCs\|5mCs\|dAs\|5mCs\|o5mCs\|o5mCs\|oAs\|LTs\|oGs\|oT] |
| 3343 | [oGs\|oGs\|oAs\|dGs\|5mCs\|dTs\|5mCs\|dTs\|dTs\|dTs\|5mCs\|5mCs\|dAs\|5mCs\|o5mCs\|o5mCs\|LAs\|oTs\|oGs\|oT] |
| 3344 | [oGs\|LGs\|oAs\|oGs\|o5mCs\|oTs\|5mCs\|dTs\|dTs\|dTs\|5mCs\|5mCs\|dAs\|5mCs\|5mCs\|5mCs\|oAs\|oT] |
| 3345 | [oGs\|oGs\|LAs\|oGs\|o5mCs\|oTs\|5mCs\|dTs\|dTs\|dTs\|5mCs\|5mCs\|dAs\|5mCs\|5mCs\|5mCs\|oAs\|oT] |
| 3346 | [oGs\|oGs\|oAs\|LGs\|o5mCs\|oTs\|5mCs\|dTs\|dTs\|dTs\|5mCs\|5mCs\|dAs\|5mCs\|5mCs\|5mCs\|oAs\|oT] |
| 3347 | [oGs\|oGs\|oAs\|oGs\|L5mCs\|oTs\|5mCs\|dTs\|dTs\|dTs\|5mCs\|5mCs\|dAs\|5mCs\|5mCs\|5mCs\|oAs\|oT] |
| 3348 | [oAs\|oGs\|5mCs\|dTs\|5mCs\|dTs\|dTs\|dTs\|5mCs\|5mCs\|dAs\|5mCs\|o5mCs\|o5mCs\|oAs\|oTs\|LGs\|oT] |
| 3349 | [oAs\|oGs\|5mCs\|dTs\|5mCs\|dTs\|dTs\|dTs\|5mCs\|5mCs\|dAs\|5mCs\|o5mCs\|o5mCs\|oAs\|LTs\|oGs\|oT] |
| 3350 | [oAs\|oGs\|5mCs\|dTs\|5mCs\|dTs\|dTs\|dTs\|5mCs\|5mCs\|dAs\|5mCs\|o5mCs\|o5mCs\|LAs\|oTs\|oGs\|oT] |
| 3351 | [oAs\|oGs\|5mCs\|dTs\|5mCs\|dTs\|dTs\|dTs\|5mCs\|5mCs\|dAs\|5mCs\|o5mCs\|L5mCs\|oAs\|oTs\|oGs\|oT] |
| 3352 | [oGs\|LGs\|oAs\|oGs\|o5mCs\|dTs\|5mCs\|dTs\|dTs\|dTs\|5mCs\|5mCs\|dAs\|5mCs\|5mCs\|o5mCs\|oAs\|oTs\|oGs\|oT] |
| 3353 | [oGs\|oGs\|LAs\|oGs\|o5mCs\|dTs\|5mCs\|dTs\|dTs\|dTs\|5mCs\|5mCs\|dAs\|5mCs\|5mCs\|o5mCs\|oAs\|oTs\|oGs\|oT] |
| 3354 | [oGs\|oGs\|oAs\|LGs\|o5mCs\|dTs\|5mCs\|dTs\|dTs\|dTs\|5mCs\|5mCs\|dAs\|5mCs\|5mCs\|o5mCs\|oAs\|oTs\|oGs\|oT] |
| 3355 | [oGs\|oGs\|oAs\|oGs\|o5mCs\|dTs\|5mCs\|dTs\|dTs\|dTs\|5mCs\|5mCs\|dAs\|5mCs\|5mCs\|o5mCs\|oAs\|oTs\|LGs\|oT] |
| 3356 | [oGs\|oGs\|oAs\|oGs\|o5mCs\|dTs\|5mCs\|dTs\|dTs\|dTs\|5mCs\|5mCs\|dAs\|5mCs\|5mCs\|o5mCs\|oAs\|LTs\|oGs\|oT] |
| 3357 | [oGs\|oGs\|oAs\|oGs\|o5mCs\|dTs\|5mCs\|dTs\|dTs\|dTs\|5mCs\|5mCs\|dAs\|5mCs\|5mCs\|o5mCs\|LAs\|oTs\|oGs\|oT] |
| 3358 | [oGs\|LGs\|oAs\|oGs\|o5mCs\|dTs\|5mCs\|dTs\|dTs\|dTs\|5mCs\|5mCs\|dAs\|5mCs\|5mCs\|o5mCs\|oAs\|oTs\|oG] |
| 3359 | [oGs\|oGs\|LAs\|oGs\|o5mCs\|dTs\|5mCs\|dTs\|dTs\|dTs\|5mCs\|5mCs\|dAs\|5mCs\|5mCs\|o5mCs\|oAs\|oTs\|oG] |
| 3360 | [oGs\|oGs\|oAs\|LGs\|o5mCs\|dTs\|5mCs\|dTs\|dTs\|dTs\|5mCs\|5mCs\|dAs\|5mCs\|5mCs\|o5mCs\|oAs\|oTs\|oG] |
| 3361 | [oGs\|oAs\|oGs\|o5mCs\|dTs\|5mCs\|dTs\|dTs\|dTs\|5mCs\|5mCs\|dAs\|5mCs\|5mCs\|o5mCs\|oAs\|oTsILGs\|oT] |
| 3362 | [oGs\|oAs\|oGs\|o5mCs\|dTs\|5mCs\|dTs\|dTs\|dTs\|5mCs\|5mCs\|dAs\|5mCs\|5mCs\|o5mCs\|oAs\|LTs\|oGs\|oT] |
| 3363 | [oGs\|oAs\|oGs\|o5mCs\|dTs\|5mCs\|dTs\|dTs\|dTs\|5mCs\|5mCs\|dAs\|5mCs\|5mCs\|o5mCs\|LAs\|oTs\|oGs\|oT] |
| 3364 | [oGs\|LGs\|oAs\|oGs\|o5mCs\|dTs\|5mCs\|dTs\|dTs\|dTs\|5mCs\|5mCs\|dAs\|5mCs\|5mCs\|o5mCs\|oAs\|oT] |
| 3365 | [oGs\|oGs\|LAs\|oGs\|o5mCs\|dTs\|5mCs\|dTs\|dTs\|dTs\|5mCs\|5mCs\|dAs\|5mCs\|5mCs\|o5mCs\|oAs\|oT] |
| 3366 | [oGs\|oGs\|oAs\|LGs\|o5mCs\|dTs\|5mCs\|dTs\|dTs\|dTs\|5mCs\|5mCs\|dAs\|5mCs\|5mCs\|o5mCs\|oAs\|oT] |
| 3367 | [oAs\|oGs\|o5mCs\|dTs\|5mCs\|dTs\|dTs\|dTs\|5mCs\|5mCs\|dAs\|5mCs\|5mCs\|o5mCs\|oAs\|oTs\|LGs\|oT] |
| 3368 | [oAs\|oGs\|o5mCs\|dTs\|5mCs\|dTs\|dTs\|dTs\|5mCs\|5mCs\|dAs\|5mCs\|5mCs\|o5mCs\|oAs\|LTs\|oGs\|oT] |
| 3369 | [oAs\|oGs\|o5mCs\|dTs\|5mCs\|dTs\|dTs\|dTs\|5mCs\|5mCs\|dAs\|5mCs\|5mCs\|o5mCs\|LAs\|oTs\|oGs\|oT] |
| 3370 | [oGs\|LGs\|oAs\|oGs\|o5mCs\|dTs\|5mCs\|dTs\|dTs\|dTs\|5mCs\|5mCs\|dAs\|5mCs\|5mCs\|o5mCs\|oA] |
| 3371 | [oGs\|oGs\|LAs\|oGs\|o5mCs\|dTs\|5mCs\|dTs\|dTs\|dTs\|5mCs\|5mCs\|dAs\|5mCs\|5mCs\|o5mCs\|oA] |
| 3372 | [oGs\|oGs\|oAs\|LGs\|o5mCs\|dTs\|5mCs\|dTs\|dTs\|dTs\|5mCs\|5mCs\|dAs\|5mCs\|5mCs\|o5mCs\|oA] |
| 3373 | [oGs\|o5mCs\|dTs\|5mCs\|dTs\|dTs\|dTs\|5mCs\|5mCs\|dAs\|5mCs\|5mCs\|o5mCs\|oAs\|oTs\|LGs\|oT] |
| 3374 | [oGs\|o5mCs\|dTs\|5mCs\|dTs\|dTs\|dTs\|5mCs\|5mCs\|dAs\|5mCs\|5mCs\|o5mCs\|oAs\|LTs\|oGs\|oT] |
| 3375 | [oGs\|o5mCs\|dTs\|5mCs\|dTs\|dTs\|dTs\|5mCs\|5mCs\|dAs\|5mCs\|5mCs\|o5mCs\|LAs\|oTs\|oGs\|oT] |
| 3376 | [oGs\|LAs\|oGs\|o5mCs\|dTs\|5mCs\|dTs\|dTs\|dTs\|5mCs\|5mCs\|dAs\|5mCs\|5mCs\|o5mCs\|oAs\|oTs\|oGs\|oT] |
| 3377 | [oGs\|oAs\|LGs\|o5mCs\|dTs\|5mCs\|dTs\|dTs\|dTs\|5mCs\|5mCs\|dAs\|5mCs\|5mCs\|o5mCs\|oAs\|oTs\|oGs\|oT] |
| 3378 | [oGs\|oGs\|oAs\|oGs\|o5mCs\|dTs\|5mCs\|dTs\|dTs\|dTs\|5mCs\|5mCs\|dAs\|5mCs\|5mCs\|o5mCs\|oAs\|LTs\|oG] |
| 3379 | [oGs\|oGs\|oAs\|oGs\|o5mCs\|dTs\|5mCs\|dTs\|dTs\|dTs\|5mCs\|5mCs\|dAs\|5mCs\|5mCs\|o5mCs\|LAs\|oTs\|oG] |
| 3380 | [oGs\|LAs\|oGs\|o5mCs\|dTs\|5mCs\|dTs\|dTs\|dTs\|5mCs\|5mCs\|dAs\|5mCs\|5mCs\|o5mCs\|oAs\|oTs\|oG] |
| 3381 | [oGs\|oAs\|LGs\|o5mCs\|dTs\|5mCs\|dTs\|dTs\|dTs\|5mCs\|5mCs\|dAs\|5mCs\|5mCs\|o5mCs\|oAs\|oTs\|oG] |
| 3382 | [oGs\|oAs\|oGs\|o5mCs\|dTs\|5mCs\|dTs\|dTs\|dTs\|5mCs\|5mCs\|dAs\|5mCs\|5mCs\|o5mCs\|oAs\|LTs\|oG] |
| 3383 | [oGs\|oAs\|oGs\|o5mCs\|dTs\|5mCs\|dTs\|dTs\|dTs\|5mCs\|5mCs\|dAs\|5mCs\|5mCs\|o5mCs\|LAs\|oTs\|oG] |
| 3384 | [oGs\|LAs\|oGs\|o5mCs\|dTs\|5mCs\|dTs\|dTs\|dTs\|5mCs\|5mCs\|dAs\|5mCs\|5mCs\|o5mCs\|oAs\|oT] |
| 3385 | [oGs\|oAs\|LGs\|o5mCs\|dTs\|5mCs\|dTs\|dTs\|dTs\|5mCs\|5mCs\|dAs\|5mCs\|5mCs\|o5mCs\|oAs\|oT] |
| 3386 | [oGs\|oAs\|oGs\|o5mCs\|dTs\|5mCs\|dTs\|dTs\|dTs\|5mCs\|5mCs\|dAs\|5mCs\|5mCs\|o5mCs\|LAs\|oT] |
| 3387 | [oGs\|oGs\|oAs\|oGs\|o5mCs\|oTs\|o5mCs\|oTs\|dTs\|dTs\|5mCs\|5mCs\|dAs\|5mCs\|5mCs\|5mCs\|dAs\|dTs\|oGs\|oT] |
| 3388 | [oGs\|oGs\|dAs\|dGs\|5mCs\|dTs\|5mCs\|dTs\|dTs\|dTs\|5mCs\|5mCs\|oAs\|o5mCs\|o5mCs\|o5mCs\|oAs\|oTs\|oGs\|oT] |
| 3389 | [oGs\|oGs\|oAs\|oGs\|o5mCs\|oTs\|o5mCs\|dTs\|dTs\|dTs\|5mCs\|5mCs\|dAs\|5mCs\|5mCs\|5mCs\|dAs\|oTs\|oGs\|oT] |
| 3390 | [oGs\|oGs\|oAs\|dGs\|5mCs\|dTs\|5mCs\|dTs\|dTs\|dTs\|5mCs\|5mCs\|dAs\|o5mCs\|o5mCs\|o5mCs\|oAs\|oTs\|oGs\|oT] |
| 3391 | [oGs\|oGs\|oAs\|oGs\|o5mCs\|oTs\|o5mCs\|dTs\|dTs\|dTs\|5mCs\|5mCs\|dAs\|5mCs\|5mCs\|5mCs\|dAs\|oTs\|oG] |
| 3392 | [oGs\|oAs\|dGs\|5mCs\|dTs\|5mCs\|dTs\|dTs\|dTs\|5mCs\|5mCs\|dAs\|o5mCs\|o5mCs\|o5mCs\|oAs\|oTs\|oGs\|oT] |
| 3393 | [oGs\|oGs\|oAs\|oGs\|o5mCs\|oTs\|5mCs\|dTs\|dTs\|dTs\|5mCs\|5mCs\|dAs\|5mCs\|5mCs\|5mCs\|oAs\|oTs\|oGs\|oT] |
| 3394 | [oGs\|oGs\|oAs\|oGs\|5mCs\|dTs\|5mCs\|dTs\|dTs\|dTs\|5mCs\|5mCs\|dAs\|5mCs\|o5mCs\|o5mCs\|oAs\|oTs\|oGs\|oT] |
| 3395 | [oGs\|oGs\|oAs\|oGs\|o5mCs\|oTs\|5mCs\|dTs\|dTs\|dTs\|5mCs\|5mCs\|dAs\|5mCs\|5mCs\|5mCs\|oAs\|oTs\|oG] |
| 3396 | [oGs\|oGs\|oAs\|dGs\|5mCs\|dTs\|5mCs\|dTs\|dTs\|dTs\|5mCs\|5mCs\|dAs\|5mCs\|o5mCs\|o5mCs\|oAs\|oTs\|oGs\|oT] |
| 3397 | [oGs\|oGs\|oAs\|oGs\|o5mCs\|oTs\|5mCs\|dTs\|dTs\|dTs\|5mCs\|5mCs\|dAs\|5mCs\|5mCs\|5mCs\|oAs\|oT] |
| 3398 | [oAs\|oGs\|5mCs\|dTs\|5mCs\|dTs\|dTs\|dTs\|5mCs\|5mCs\|dAs\|5mCs\|o5mCs\|o5mCs\|oAs\|oTs\|oGs\|oT] |
| 3399 | [oGs\|oGs\|oAs\|oGs\|o5mCs\|dTs\|5mCs\|dTs\|dTs\|dTs\|5mCs\|5mCs\|dAs\|5mCs\|5mCs\|o5mCs\|oAs\|oTs\|oGs\|oT] |
| 3400 | [oGs\|oGs\|oAs\|oGs\|o5mCs\|dTs\|5mCs\|dTs\|dTs\|dTs\|5mCs\|5mCs\|dAs\|5mCs\|5mCs\|o5mCs\|oAs\|oTs\|oG] |
| 3401 | [oGs\|oGs\|oAs\|oGs\|o5mCs\|dTs\|5mCs\|dTs\|dTs\|dTs\|5mCs\|5mCs\|dAs\|5mCs\|5mCs\|o5mCs\|oAs\|oT] |
| 3402 | [oAs\|oGs\|o5mCs\|dTs\|5mCs\|dTs\|dTs\|dTs\|5mCs\|5mCs\|dAs\|5mCs\|5mCs\|o5mCs\|oAs\|oTs\|oGs\|oT] |
| 3403 | [oGs\|oGs\|oAs\|oGs\|o5mCs\|dTs\|5mCs\|dTs\|dTs\|dTs\|5mCs\|5mCs\|dAs\|5mCs\|5mCs\|o5mCs\|oA] |
| 3404 | [oGs\|o5mCs\|dTs\|5mCs\|dTs\|dTs\|dTs\|5mCs\|5mCs\|dAs\|5mCs\|5mCs\|o5mCs\|oAs\|oTs\|oGs\|oT] |
| 3405 | [oGs\|oAs\|oGs\|o5mCs\|dTs\|5mCs\|dTs\|dTs\|dTs\|5mCs\|5mCs\|dAs\|5mCs\|5mCs\|o5mCs\|oAs\|oTs\|oGs\|oT] |
| 3406 | [oGs\|oAs\|oGs\|o5mCs\|dTs\|5mCs\|dTs\|dTs\|dTs\|5mCs\|5mCs\|dAs\|5mCs\|5mCs\|o5mCs\|oAs\|oTs\|oG] |
| 3407 | [oGs\|oAs\|oGs\|o5mCs\|dTs\|5mCs\|dTs\|dTs\|dTs\|5mCs\|5mCs\|dAs\|5mCs\|5mCs\|o5mCs\|oAs\|oT] |
| 3408 | [oGs\|oGs\|oAp\|oGs\|o5mCs\|dTs\|5mCs\|dTs\|dTs\|dTs\|5mCs\|5mCs\|dAs\|5mCs\|5mCs\|o5mCs\|oAs\|oTs\|oGs\|oT] |
| 3409 | [oGs\|oGs\|oAs\|oGp\|o5mCs\|dTs\|5mCs\|dTs\|dTs\|dTs\|5mCs\|5mCs\|dAs\|5mCs\|5mCs\|o5mCs\|oAs\|oTs\|oGs\|oT] |
| 3410 | [oGs\|oGs\|oAp\|oGp\|o5mCs\|dTs\|5mCs\|dTs\|dTs\|dTs\|5mCs\|5mCs\|dAs\|5mCs\|5mCs\|o5mCs\|oAs\|oTs\|oGs\|oT] |
| 3411 | [oGs\|oGs\|oAs\|oGs\|o5mCs\|dTs\|5mCs\|dTs\|dTs\|dTs\|5mCs\|5mCs\|dAs\|5mCs\|5mCs\|o5mCs\|oAp\|oTs\|oGs\|oT] |
| 3412 | [oGs\|oGs\|oAs\|oGs\|o5mCs\|dTs\|5mCs\|dTs\|dTs\|dTs\|5mCs\|5mCs\|dAs\|5mCs\|5mCs\|o5mCp\|oAs\|oTs\|oGs\|oT] |
| 3413 | [oGs\|oGs\|oAs\|oGs\|o5mCs\|dTs\|5mCs\|dTs\|dTs\|dTs\|5mCs\|5mCs\|dAs\|5mCs\|5mCs\|o5mCp\|oAp\|oTs\|oGs\|oT] |
| 3414 | [oGs\|oGs\|oAp\|oGs\|o5mCs\|dTs\|5mCs\|dTs\|dTs\|dTs\|5mCs\|5mCs\|dAs\|5mCs\|5mCs\|o5mCs\|oAp\|oTs\|oGs\|oT] |
| 3415 | [oGs\|oGs\|oAp\|oGs\|o5mCs\|dTs\|5mCs\|dTs\|dTs\|dTs\|5mCs\|5mCs\|dAs\|5mCs\|5mCs\|o5mCp\|oAs\|oTs\|oGs\|oT] |
| 3416 | [oGs\|oGs\|oAs\|oGp\|o5mCs\|dTs\|5mCs\|dTs\|dTs\|dTs\|5mCs\|5mCs\|dAs\|5mCs\|5mCs\|o5mCs\|oAp\|oTs\|oGs\|oT] |
| 3417 | [oGs\|oGs\|oAs\|oGp\|o5mCs\|dTs\|5mCs\|dTs\|dTs\|dTs\|5mCs\|5mCs\|dAs\|5mCs\|5mCs\|o5mCp\|oAs\|oTs\|oGs\|oT] |
| 3418 | [oGs\|oGs\|oAp\|oGs\|o5mCs\|dTs\|5mCs\|dTs\|dTs\|dTs\|5mCs\|5mCs\|dAs\|5mCs\|5mCs\|o5mCp\|oAp\|oTs\|oGs\|oT] |
| 3419 | [oGs\|oGs\|oAs\|oGp\|o5mCs\|dTs\|5mCs\|dTs\|dTs\|dTs\|5mCs\|5mCs\|dAs\|5mCs\|5mCs\|o5mCp\|oAp\|oTs\|oGs\|oT] |
| 3420 | [oGs\|oGs\|oAp\|oGp\|o5mCs\|dTs\|5mCs\|dTs\|dTs\|dTs\|5mCs\|5mCs\|dAs\|5mCs\|5mCs\|o5mCs\|oAp\|oTs\|oGs\|oT] |
| 3421 | [oGs\|oGs\|oAp\|oGp\|o5mCs\|dTs\|5mCs\|dTs\|dTs\|dTs\|5mCs\|5mCs\|dAs\|5mCs\|5mCs\|o5mCp\|oAs\|oTsloGs\|oT] |
| 3422 | [oGs\|oGs\|oAp\|oGp\|o5mCs\|dTs\|5mCs\|dTs\|dTs\|dTs\|5mCs\|5mCs\|dAs\|5mCs\|5mCs\|o5mCp\|oAp\|oTs\|oGs\|oT] |
| 3423 | [oGs\|oGs\|oAs\|oGs\|o5mCs\|dTs\|5mCs\|dTs\|dTs\|dTs\|5mCs\|5mCs\|dAs\|5mCs\|5mCs\|o5mCs\|oAs\|oTs\|oGs\|oTs\|oT] |
| 3424 | [oGs\|oGs\|oAp\|oGs\|o5mCs\|dTs\|5mCs\|dTs\|dTs\|dTs\|5mCs\|5mCs\|dAs\|5mCs\|5mCs\|o5mCs\|oAs\|oTs\|oGs\|oTs\|oT] |
| 3425 | [oGs\|oGs\|oAs\|oGp\|o5mCs\|dTs\|5mCs\|dTs\|dTs\|dTs\|5mCs\|5mCs\|dAs\|5mCs\|5mCs\|o5mCs\|oAs\|oTs\|oGs\|oTs\|oT] |
| 3426 | [oGs\|oGs\|oAp\|oGp\|o5mCs\|dTs\|5mCs\|dTs\|dTs\|dTs\|5mCs\|5mCs\|dAs\|5mCs\|5mCs\|o5mCs\|oAs\|oTs\|oGs\|oTs\|oT] |
| 3427 | [oGs\|oGs\|oAs\|oGs\|o5mCs\|dTs\|5mCs\|dTs\|dTs\|dTs\|5mCs\|5mCs\|dAs\|5mCs\|5mCs\|o5mCs\|oAp\|oTs\|oGs\|oTs\|oT] |
| 3428 | [oGs\|oGs\|oAs\|oGs\|o5mCs\|dTs\|5mCs\|dTs\|dTs\|dTs\|5mCs\|5mCs\|dAs\|5mCs\|5mCs\|o5mCp\|oAs\|oTs\|oGs\|oTs\|oT] |
| 3429 | [oGs\|oGs\|oAs\|oGs\|o5mCs\|dTs\|5mCs\|dTs\|dTs\|dTs\|5mCs\|5mCs\|dAs\|5mCs\|5mCs\|o5mCp\|oAp\|oTs\|oGs\|oTs\|oT] |
| 3430 | [oGs\|oGs\|oAp\|oGs\|o5mCs\|dTs\|5mCs\|dTs\|dTs\|dTs\|5mCs\|5mCs\|dAs\|5mCs\|5mCs\|o5mCs\|oAp\|oTs\|oGs\|oTs\|oT] |
| 3431 | [oGs\|oGs\|oAp\|oGs\|o5mCs\|dTs\|5mCs\|dTs\|dTs\|dTs\|5mCs\|5mCs\|dAs\|5mCs\|5mCs\|o5mCp\|oAs\|oTs\|oGs\|oTs\|oT] |
| 3432 | [oGs\|oGs\|oAs\|oGp\|o5mCs\|dTs\|5mCs\|dTs\|dTs\|dTs\|5mCs\|5mCs\|dAs\|5mCs\|5mCs\|o5mCs\|oAp\|oTs\|oGs\|oTs\|oT] |
| 3433 | [oGs\|oGs\|oAs\|oGp\|o5mCs\|dTs\|5mCs\|dTs\|dTs\|dTs\|5mCs\|5mCs\|dAs\|5mCs\|5mCs\|o5mCp\|oAs\|oTs\|oGs\|oTs\|oT] |
| 3434 | [oGs\|oGs\|oAp\|oGs\|o5mCs\|dTs\|5mCs\|dTs\|dTs\|dTs\|5mCs\|5mCs\|dAs\|5mCs\|5mCs\|o5mCp\|oAp\|oTs\|oGs\|oTs\|oT] |
| 3435 | [oGs\|oGs\|oAs\|oGp\|o5mCs\|dTs\|5mCs\|dTs\|dTs\|dTs\|5mCs\|5mCs\|dAs\|5mCs\|5mCs\|o5mCp\|oAp\|oTs\|oGs\|oTs\|oT] |
| 3436 | [oGs\|oGs\|oAp\|oGp\|o5mCs\|dTs\|5mCs\|dTs\|dTs\|dTs\|5mCs\|5mCs\|dAs\|5mCs\|5mCs\|o5mCs\|oAp\|oTs\|oGs\|oTs\|oT] |
| 3437 | [oGs\|oGs\|oAp\|oGp\|o5mCs\|dTs\|5mCs\|dTs\|dTs\|dTs\|5mCs\|5mCs\|dAs\|5mCs\|5mCs\|o5mCp\|oAs\|oTs\|oGs\|oTs\|oT] |
| 3438 | [oGs\|oGs\|oAp\|oGp\|o5mCs\|dTs\|5mCs\|dTs\|dTs\|dTs\|5mCs\|5mCs\|dAs\|5mCs\|5mCs\|o5mCp\|oAp\|oTs\|oGs\|oTs\|oT] |
| 3439 | [oGs\|oGs\|oAs\|oGs\|o5mCs\|dTs\|5mCs\|dTs\|dTs\|dTs\|5mCs\|5mCs\|dAs\|5mCs\|5mCs\|o5mCs\|oAs\|oTs\|oGs\|oTs\|oTs\|oT] |
| 3440 | [oGs\|oGs\|oAp\|oGs\|o5mCs\|dTs\|5mCs\|dTs\|dTs\|dTs\|5mCs\|5mCs\|dAs\|5mCs\|5mCs\|o5mCs\|oAs\|oTs\|oGs\|oTs\|oTs\|oT] |
| 3441 | [oGs\|oGs\|oAs\|oGp\|o5mCs\|dTs\|5mCs\|dTs\|dTs\|dTs\|5mCs\|5mCs\|dAs\|5mCs\|5mCs\|o5mCs\|oAs\|oTs\|oGs\|oTs\|oTs\|oT] |
| 3442 | [oGs\|oGs\|oAp\|oGp\|o5mCs\|dTs\|5mCs\|dTs\|dTs\|dTs\|5mCs\|5mCs\|dAs\|5mCs\|5mCs\|o5mCs\|oAs\|oTs\|oGs\|oTs\|oTs\|oT] |
| 3443 | [oGs\|oGs\|oAs\|oGs\|o5mCs\|dTs\|5mCs\|dTs\|dTs\|dTs\|5mCs\|5mCs\|dAs\|5mCs\|5mCs\|o5mCs\|oAp\|oTs\|oGs\|oTs\|oTs\|oT] |
| 3444 | [oGs\|oGs\|oAs\|oGs\|o5mCs\|dTs\|5mCs\|dTs\|dTs\|dTs\|5mCs\|5mCs\|dAs\|5mCs\|5mCs\|o5mCp\|oAs\|oTs\|oGs\|oTs\|oTs\|oT] |
| 3445 | [oGs\|oGs\|oAs\|oGs\|o5mCs\|dTs\|5mCs\|dTs\|dTs\|dTs\|5mCs\|5mCs\|dAs\|5mCs\|5mCs\|o5mCp\|oAp\|oTs\|oGs\|oTs\|oTs\|oT] |
| 3446 | [oGs\|oGs\|oAp\|oGs\|o5mCs\|dTs\|5mCs\|dTs\|dTs\|dTs\|5mCs\|5mCs\|dAs\|5mCs\|5mCs\|o5mCs\|oAp\|oTs\|oGs\|oTs\|oTs\|oT] |
| 3447 | [oGs\|oGs\|oAp\|oGs\|o5mCs\|dTs\|5mCs\|dTs\|dTs\|dTs\|5mCs\|5mCs\|dAs\|5mCs\|5mCs\|o5mCp\|oAs\|oTs\|oGs\|oTs\|oTs\|oT] |
| 3448 | [oGs\|oGs\|oAs\|oGp\|o5mCs\|dTs\|5mCs\|dTs\|dTs\|dTs\|5mCs\|5mCs\|dAs\|5mCs\|5mCs\|o5mCs\|oAp\|oTs\|oGs\|oTs\|oTs\|oT] |
| 3449 | [oGs\|oGs\|oAs\|oGp\|o5mCs\|dTs\|5mCs\|dTs\|dTs\|dTs\|5mCs\|5mCs\|dAs\|5mCs\|5mCs\|o5mCp\|oAs\|oTs\|oGs\|oTs\|oTs\|oT] |
| 3450 | [oGs\|oGs\|oAp\|oGs\|o5mCs\|dTs\|5mCs\|dTs\|dTs\|dTs\|5mCs\|5mCs\|dAs\|5mCs\|5mCs\|o5mCp\|oAp\|oTs\|oGs\|oTs\|oTs\|oT] |
| 3451 | [oGs\|oGs\|oAs\|oGp\|o5mCs\|dTs\|5mCs\|dTs\|dTs\|dTs\|5mCs\|5mCs\|dAs\|5mCs\|5mCs\|o5mCp\|oAp\|oTs\|oGs\|oTs\|oTs\|oT] |
| 3452 | [oGs\|oGs\|oAp\|oGp\|o5mCs\|dTs\|5mCs\|dTs\|dTs\|dTs\|5mCs\|5mCs\|dAs\|5mCs\|5mCs\|o5mCs\|oAp\|oTs\|oGs\|oTs\|oTs\|oT] |
| 3453 | [oGs\|oGs\|oAp\|oGp\|o5mCs\|dTs\|5mCs\|dTs\|dTs\|dTs\|5mCs\|5mCs\|dAs\|5mCs\|5mCs\|o5mCp\|oAs\|oTs\|oGs\|oTs\|oTs\|oT] |
| 3454 | [oGs\|oGs\|oAp\|oGp\|o5mCs\|dTs\|5mCs\|dTs\|dTs\|dTs\|5mCs\|5mCs\|dAs\|5mCs\|5mCs\|o5mCp\|oAp\|oTs\|oGs\|oTs\|oTs\|oT] |
| 3455 | [oGs\|oGs\|oAs\|oGs\|o5mCs\|dTs\|5mCs\|dTs\|dTs\|dTs\|5mCs\|5mCs\|dAs\|5mCs\|5mCs\|o5mCs\|oAs\|oTs\|oGs\|oTs\|oTs\|oTs\|oG] |
| 3456 | [oGs\|oGs\|oAp\|oGs\|o5mCs\|dTs\|5mCs\|dTs\|dTs\|dTs\|5mCs\|5mCs\|dAs\|5mCs\|5mCs\|o5mCs\|oAs\|oTs\|oGs\|oTs\|oTs\|oTs\|oG] |
| 3457 | [oGs\|oGs\|oAs\|oGp\|o5mCs\|dTs\|5mCs\|dTs\|dTs\|dTs\|5mCs\|5mCs\|dAs\|5mCs\|5mCs\|o5mCs\|oAs\|oTs\|oGs\|oTs\|oTs\|oTs\|oG] |
| 3458 | [oGs\|oGs\|oAp\|oGp\|o5mCs\|dTs\|5mCs\|dTs\|dTs\|dTs\|5mCs\|5mCs\|dAs\|5mCs\|5mCs\|o5mCs\|oAs\|oTs\|oGs\|oTs\|oTs\|oTs\|oG] |
| 3459 | [oGs\|oGs\|oAs\|oGs\|o5mCs\|dTs\|5mCs\|dTs\|dTs\|dTs\|5mCs\|5mCs\|dAs\|5mCs\|5mCs\|o5mCs\|oAp\|oTs\|oGs\|oTs\|oTs\|oTs\|oG] |
| 3460 | [oGs\|oGs\|oAs\|oGs\|o5mCs\|dTs\|5mCs\|dTs\|dTs\|dTs\|5mCs\|5mCs\|dAs\|5mCs\|5mCs\|o5mCp\|oAs\|oTs\|oGs\|oTs\|oTs\|oTs\|oG] |
| 3461 | [oGs\|oGs\|oAs\|oGs\|o5mCs\|dTs\|5mCs\|dTs\|dTs\|dTs\|5mCs\|5mCs\|dAs\|5mCs\|5mCs\|o5mCp\|oAp\|oTs\|oGs\|oTs\|oTs\|oTs\|oG] |
| 3462 | [oGs\|oGs\|oAp\|oGs\|o5mCs\|dTs\|5mCs\|dTs\|dTs\|dTs\|5mCs\|5mCs\|dAs\|5mCs\|5mCs\|o5mCs\|oAp\|oTs\|oGs\|oTs\|oTs\|oTs\|oG] |
| 3463 | [oGs\|oGs\|oAp\|oGs\|o5mCs\|dTs\|5mCs\|dTs\|dTs\|dTs\|5mCs\|5mCs\|dAs\|5mCs\|5mCs\|o5mCp\|oAs\|oTs\|oGs\|oTs\|oTs\|oTs\|oG] |
| 3464 | [oGs\|oGs\|oAs\|oGp\|o5mCs\|dTs\|5mCs\|dTs\|dTs\|dTs\|5mCs\|5mCs\|dAs\|5mCs\|5mCs\|o5mCs\|oAp\|oTs\|oGs\|oTs\|oTs\|oTs\|oG] |
| 3465 | [oGs\|oGs\|oAs\|oGp\|o5mCs\|dTs\|5mCs\|dTs\|dTs\|dTs\|5mCs\|5mCs\|dAs\|5mCs\|5mCs\|o5mCp\|oAs\|oTs\|oGs\|oTs\|oTs\|oTs\|oG] |
| 3466 | [oGs\|oGs\|oAp\|oGs\|o5mCs\|dTs\|5mCs\|dTs\|dTs\|dTs\|5mCs\|5mCs\|dAs\|5mCs\|5mCs\|o5mCp\|oAp\|oTs\|oGs\|oTs\|oTs\|oTs\|oG] |
| 3467 | [oGs\|oGs\|oAs\|oGp\|o5mCs\|dTs\|5mCs\|dTs\|dTs\|dTs\|5mCs\|5mCs\|dAs\|5mCs\|5mCs\|o5mCp\|oAp\|oTs\|oGs\|oTs\|oTs\|oTs\|oG] |
| 3468 | [oGs\|oGs\|oAp\|oGp\|o5mCs\|dTs\|5mCs\|dTs\|dTs\|dTs\|5mCs\|5mCs\|dAs\|5mCs\|5mCs\|o5mCs\|oAp\|oTs\|oGs\|oTs\|oTs\|oTs\|oG] |
| 3469 | [oGs\|oGs\|oAp\|oGp\|o5mCs\|dTs\|5mCs\|dTs\|dTs\|dTs\|5mCs\|5mCs\|dAs\|5mCs\|5mCs\|o5mCp\|oAs\|oTs\|oGs\|oTs\|oTs\|oTs\|oG] |
| 3470 | [oGs\|oGs\|oAp\|oGp\|o5mCs\|dTs\|5mCs\|dTs\|dTs\|dTs\|5mCs\|5mCs\|dAs\|5mCs\|5mCs\|o5mCp\|oAp\|oTs\|oGs\|oTs\|oTs\|oTs\|oG] |
| 3471 | [oGs\|oGs\|oAs\|oGs\|o5mCs\|dTs\|5mCs\|dTs\|dTs\|dTs\|5mCs\|5mCs\|dAs\|5mCs\|5mCs\|5mCs\|oAs\|oTs\|oGs\|oTs\|oT] |
| 3472 | [oGs\|oGs\|oAp\|oGs\|o5mCs\|dTs\|5mCs\|dTs\|dTs\|dTs\|5mCs\|5mCs\|dAs\|5mCs\|5mCs\|5mCs\|oAs\|oTs\|oGs\|oTs\|oT] |
| 3473 | [oGs\|oGs\|oAs\|oGp\|o5mCs\|dTs\|5mCs\|dTs\|dTs\|dTs\|5mCs\|5mCs\|dAs\|5mCs\|5mCs\|5mCs\|oAs\|oTs\|oGs\|oTs\|oT] |
| 3474 | [oGs\|oGs\|oAp\|oGp\|o5mCs\|dTs\|5mCs\|dTs\|dTs\|dTs\|5mCs\|5mCs\|dAs\|5mCs\|5mCs\|5mCs\|oAs\|oTs\|oGs\|oTs\|oT] |
| 3475 | [oGs\|oGs\|oAs\|oGs\|o5mCs\|dTs\|5mCs\|dTs\|dTs\|dTs\|5mCs\|5mCs\|dAs\|5mCs\|5mCs\|5mCs\|oAp\|oTs\|oGs\|oTs\|oT] |
| 3476 | [oGs\|oGs\|oAs\|oGs\|o5mCs\|dTs\|5mCs\|dTs\|dTs\|dTs\|5mCs\|5mCs\|dAs\|5mCs\|5mCs\|5mCp\|oAs\|oTs\|oGs\|oTs\|oT] |
| 3477 | [oGs\|oGs\|oAs\|oGs\|o5mCs\|dTs\|5mCs\|dTs\|dTs\|dTs\|5mCs\|5mCs\|dAs\|5mCs\|5mCs\|5mCp\|oAp\|oTs\|oGs\|oTs\|oT] |
| 3478 | [oGs\|oGs\|oAp\|oGs\|o5mCs\|dTs\|5mCs\|dTs\|dTs\|dTs\|5mCs\|5mCs\|dAs\|5mCs\|5mCs\|5mCs\|oAp\|oTs\|oGs\|oTs\|oT] |
| 3479 | [oGs\|oGs\|oAp\|oGs\|o5mCs\|dTs\|5mCs\|dTs\|dTs\|dTs\|5mCs\|5mCs\|dAs\|5mCs\|5mCs\|5mCp\|oAs\|oTs\|oGs\|oTs\|oT] |
| 3480 | [oGs\|oGs\|oAs\|oGp\|o5mCs\|dTs\|5mCs\|dTs\|dTs\|dTs\|5mCs\|5mCs\|dAs\|5mCs\|5mCs\|5mCs\|oAp\|oTs\|oGs\|oTs\|oT] |
| 3481 | [oGs\|oGs\|oAs\|oGp\|o5mCs\|dTs\|5mCs\|dTs\|dTs\|dTs\|5mCs\|5mCs\|dAs\|5mCs\|5mCs\|5mCp\|oAs\|oTs\|oGs\|oTs\|oT] |
| 3482 | [oGs\|oGs\|oAp\|oGs\|o5mCs\|dTs\|5mCs\|dTs\|dTs\|dTs\|5mCs\|5mCs\|dAs\|5mCs\|5mCs\|5mCp\|oAp\|oTs\|oGs\|oTs\|oT] |
| 3483 | [oGs\|oGs\|oAs\|oGp\|o5mCs\|dTs\|5mCs\|dTs\|dTs\|dTs\|5mCs\|5mCs\|dAs\|5mCs\|5mCs\|5mCp\|oAp\|oTs\|oGs\|oTs\|oT] |
| 3484 | [oGs\|oGs\|oAp\|oGp\|o5mCs\|dTs\|5mCs\|dTs\|dTs\|dTs\|5mCs\|5mCs\|dAs\|5mCs\|5mCs\|5mCs\|oAp\|oTs\|oGs\|oTs\|oT] |
| 3485 | [oGs\|oGs\|oAp\|oGp\|o5mCs\|dTs\|5mCs\|dTs\|dTs\|dTs\|5mCs\|5mCs\|dAs\|5mCs\|5mCs\|5mCp\|oAs\|oTs\|oGs\|oTs\|oT] |
| 3486 | [oGs\|oGs\|oAp\|oGp\|o5mCs\|dTs\|5mCs\|dTs\|dTs\|dTs\|5mCs\|5mCs\|dAs\|5mCs\|5mCs\|5mCp\|oAp\|oTs\|oGs\|oTs\|oT] |
| 3487 | [oGs\|oGs\|oAs\|oGs\|o5mCs\|dTs\|5mCs\|dTs\|dTs\|dTs\|5mCs\|5mCs\|dAs\|5mCs\|5mCs\|5mCs\|dAs\|oTs\|oGs\|oTs\|oTs\|oT] |
| 3488 | [oGs\|oGs\|oAp\|oGs\|o5mCs\|dTs\|5mCs\|dTs\|dTs\|dTs\|5mCs\|5mCs\|dAs\|5mCs\|5mCs\|5mCs\|dAs\|oTs\|oGs\|oTs\|oTs\|oT] |
| 3489 | [oGs\|oGs\|oAs\|oGp\|o5mCs\|dTs\|5mCs\|dTs\|dTs\|dTs\|5mCs\|5mCs\|dAs\|5mCs\|5mCs\|5mCs\|dAs\|oTs\|oGs\|oTs\|oTs\|oT] |
| 3490 | [oGs\|oGs\|oAp\|oGp\|o5mCs\|dTs\|5mCs\|dTs\|dTs\|dTs\|5mCs\|5mCs\|dAs\|5mCs\|5mCs\|5mCs\|dAs\|oTs\|oGs\|oTs\|oTs\|oT] |
| 3491 | [oGs\|oGs\|oAs\|oGs\|o5mCs\|dTs\|5mCs\|dTs\|dTs\|dTs\|5mCs\|5mCs\|dAs\|5mCs\|5mCs\|5mCs\|dAp\|oTs\|oGs\|oTs\|oTs\|oT] |
| 3492 | [oGs\|oGs\|oAs\|oGs\|o5mCs\|dTs\|5mCs\|dTs\|dTs\|dTs\|5mCs\|5mCs\|dAs\|5mCs\|5mCs\|5mCp\|dAs\|oTs\|oGs\|oTs\|oTs\|oT] |
| 3493 | [oGs\|oGs\|oAs\|oGs\|o5mCs\|dTs\|5mCs\|dTs\|dTs\|dTs\|5mCs\|5mCs\|dAs\|5mCs\|5mCs\|5mCp\|dAp\|oTs\|oGs\|oTs\|oTs\|oT] |
| 3494 | [oGs\|oGs\|oAp\|oGs\|o5mCs\|dTs\|5mCs\|dTs\|dTs\|dTs\|5mCs\|5mCs\|dAs\|5mCs\|5mCs\|5mCs\|dAp\|oTs\|oGs\|oTs\|oTs\|oT] |
| 3495 | [oGs\|oGs\|oAp\|oGs\|o5mCs\|dTs\|5mCs\|dTs\|dTs\|dTs\|5mCs\|5mCs\|dAs\|5mCs\|5mCs\|5mCp\|dAs\|oTs\|oGs\|oTs\|oTs\|oT] |
| 3496 | [oGs\|oGs\|oAs\|oGp\|o5mCs\|dTs\|5mCs\|dTs\|dTs\|dTs\|5mCs\|5mCs\|dAs\|5mCs\|5mCs\|5mCs\|dAp\|oTs\|oGs\|oTs\|oTs\|oT] |
| 3497 | [oGs\|oGs\|oAs\|oGp\|o5mCs\|dTs\|5mCs\|dTs\|dTs\|dTs\|5mCs\|5mCs\|dAs\|5mCs\|5mCs\|5mCp\|dAs\|oTs\|oGs\|oTs\|oTs\|oT] |
| 3498 | [oGs\|oGs\|oAp\|oGs\|o5mCs\|dTs\|5mCs\|dTs\|dTs\|dTs\|5mCs\|5mCs\|dAs\|5mCs\|5mCs\|5mCp\|dAp\|oTs\|oGs\|oTs\|oTs\|oT] |
| 3499 | [oGs\|oGs\|oAs\|oGp\|o5mCs\|dTs\|5mCs\|dTs\|dTs\|dTs\|5mCs\|5mCs\|dAs\|5mCs\|5mCs\|5mCp\|dAp\|oTs\|oGs\|oTs\|oTs\|oT] |
| 3500 | [oGs\|oGs\|oAp\|oGp\|o5mCs\|dTs\|5mCs\|dTs\|dTs\|dTs\|5mCs\|5mCs\|dAs\|5mCs\|5mCs\|5mCs\|dAp\|oTs\|oGs\|oTs\|oTs\|oT] |
| 3501 | [oGs\|oGs\|oAp\|oGp\|o5mCs\|dTs\|5mCs\|dTs\|dTs\|dTs\|5mCs\|5mCs\|dAs\|5mCs\|5mCs\|5mCp\|dAs\|oTs\|oGs\|oTs\|oTs\|oT] |
| 3502 | [oGs\|oGs\|oAp\|oGp\|o5mCs\|dTs\|5mCs\|dTs\|dTs\|dTs\|5mCs\|5mCs\|dAs\|5mCs\|5mCs\|5mCp\|dAp\|oTs\|oGs\|oTs\|oTs\|oT] |
| 3503 | [oTs\|LGs\|oGs\|oTs\|oAs\|oAs\|oTs\|o5mCs\|dAs\|dAs\|dTs\|dGs\|5mCs\|dAs\|dAs\|5mCs\|dTs\|dTs\|oGs\|oT] |
| 3504 | [oTs\|oGs\|LGs\|oTs\|oAs\|oAs\|oTs\|o5mCs\|dAs\|dAs\|dTs\|dGs\|5mCs\|dAs\|dAs\|5mCs\|dTs\|dTs\|oGs\|oT] |
| 3505 | [oTs\|oGs\|oGs\|LTs\|oAs\|oAs\|oTs\|o5mCs\|dAs\|dAs\|dTs\|dGs\|5mCs\|dAs\|dAs\|5mCs\|dTs\|dTs\|oGs\|oT] |
| 3506 | [oTs\|oGs\|oGs\|oTs\|LAs\|oAs\|oTs\|o5mCs\|dAs\|dAs\|dTs\|dGs\|5mCs\|dAs\|dAs\|5mCs\|dTs\|dTs\|oGs\|oT] |
| 3507 | [oTs\|oGs\|oGs\|oTs\|oAs\|LAs\|oTs\|o5mCs\|dAs\|dAs\|dTs\|dGs\|5mCs\|dAs\|dAs\|5mCs\|dTs\|dTs\|oGs\|oT] |
| 3508 | [oTs\|oGs\|oGs\|oTs\|oAs\|oAs\|LTs\|o5mCs\|dAs\|dAs\|dTs\|dGs\|5mCs\|dAs\|dAs\|5mCs\|dTs\|dTs\|oGs\|oT] |
| 3509 | [oTs\|oGs\|dGs\|dTs\|dAs\|dAs\|dTs\|5mCs\|dAs\|dAs\|dTs\|dGs\|o5mCs\|oAs\|oAs\|o5mCs\|oTs\|oTs\|LGs\|oT] |
| 3510 | [oTs\|oGs\|dGs\|dTs\|dAs\|dAs\|dTs\|5mCs\|dAs\|dAs\|dTs\|dGs\|o5mCs\|oAs\|oAs\|o5mCs\|oTs\|LTs\|oGs\|oT] |
| 3511 | [oTs\|oGs\|dGs\|dTs\|dAs\|dAs\|dTs\|5mCs\|dAs\|dAs\|dTs\|dGs\|o5mCs\|oAs\|oAs\|o5mCs\|LTs\|oTs\|oGs\|oT] |
| 3512 | [oTs\|oGs\|dGs\|dTs\|dAs\|dAs\|dTs\|5mCs\|dAs\|dAs\|dTs\|dGs\|o5mCs\|oAs\|oAs\|L5mCs\|oTs\|oTs\|oGs\|oT] |
| 3513 | [oTs\|oGs\|dGs\|dTs\|dAs\|dAs\|dTs\|5mCs\|dAs\|dAs\|dTs dGs\|o5mCs\|oAs\|LAs\|o5mCs\|oTs\|oTs\|oGs\|oT] |
| 3514 | [oTs\|oGs\|dGs\|dTs\|dAs\|dAs\|dTs\|5mCs\|dAs\|dAs\|dTs\|dGs\|o5mCs\|LAs\|oAs\|o5mCs\|oTs\|oTs\|oGs\|oT] |
| 3515 | [oTs\|LGs\|oGs\|oTs\|oAs\|oAs\|oTs\|5mCs\|dAs\|dAs\|dTs\|dGs\|5mCs\|dAs\|dAs\|5mCs\|dTs\|oTs\|oGs\|oT] |
| 3516 | [oTs\|oGs\|LGs\|oTs\|oAs\|oAs\|oTs\|5mCs\|dAs\|dAs\|dTs\|dGs\|5mCs\|dAs\|dAs\|5mCs\|dTs\|oTs\|oGs\|oT] |
| 3517 | [oTs\|oGs\|oGs\|LTs\|oAs\|oAs\|oTs\|5mCs\|dAs\|dAs\|dTs\|dGs\|5mCs\|dAs\|dAs\|5mCs\|dTs\|oTs\|oGs\|oT] |
| 3518 | [oTs\|oGs\|oGs\|oTs\|LAs\|oAs\|oTs\|5mCs\|dAs\|dAs\|dTs\|dGs\|5mCs\|dAs\|dAs\|5mCs\|dTs\|oTs\|oGs\|oT] |
| 3519 | [oTs\|oGs\|oGs\|oTs\|oAs\|LAs\|oTs\|5mCs\|dAs\|dAs\|dTs\|dGs\|5mCs\|dAs\|dAs\|5mCs\|dTs\|oTs\|oGs\|oT] |
| 3520 | [oTs\|oGs\|oGs\|dTs\|dAs\|dAs\|dTs\|5mCs\|dAs\|dAs\|dTs\|dGs\|5mCs\|oAs\|oAs\|o5mCs\|oTs\|oTsILGs\|oT] |
| 3521 | [oTs\|oGs\|oGs\|dTs\|dAs\|dAs\|dTs\|5mCs\|dAs\|dAs\|dTs\|dGs\|5mCs\|oAs\|oAs\|o5mCs\|oTs\|LTs\|oGs\|oT] |
| 3522 | [oTs\|oGs\|oGs\|dTs\|dAs\|dAs\|dTs\|5mCs\|dAs\|dAs\|dTs\|dGs\|5mCs\|oAs\|oAs\|o5mCs\|LTs\|oTs\|oGs\|oT] |
| 3523 | [oTs\|oGs\|oGs\|dTs\|dAs\|dAs\|dTs\|5mCs\|dAs\|dAs\|dTs\|dGs\|5mCs\|oAs\|oAs\|L5mCs\|oTs\|oTs\|oGs\|oT] |
| 3524 | [oTs\|oGs\|oGs\|dTs\|dAs\|dAs\|dTs\|5mCs\|dAs\|dAs\|dTs\|dGs\|5mCs\|oAs\|LAs\|o5mCs\|oTs\|oTs\|oGs\|oT] |
| 3525 | [oTs\|LGs\|oGs\|oTs\|oAs\|oAs\|oTs\|5mCs\|dAs\|dAs\|dTs\|dGs\|5mCs\|dAs\|dAs\|5mCs\|dTs\|oTs\|oG] |
| 3526 | [oTs\|oGs\|LGs\|oTs\|oAs\|oAs\|oTs\|5mCs\|dAs\|dAs\|dTs\|dGs\|5mCs\|dAs\|dAs\|5mCs\|dTs\|oTs\|oG] |
| 3527 | [oTs\|oGs\|oGs\|LTs\|oAs\|oAs\|oTs\|5mCs\|dAs\|dAs\|dTs\|dGs\|5mCs\|dAs\|dAs\|5mCs\|dTs\|oTs\|oG] |
| 3528 | [oTs\|oGs\|oGs\|oTs\|LAs\|oAs\|oTs\|5mCs\|dAs\|dAs\|dTs\|dGs\|5mCs\|dAs\|dAs\|5mCs\|dTs\|oTs\|oG] |
| 3529 | [oTs\|oGs\|oGs\|oTs\|oAs\|LAs\|oTs\|5mCs\|dAs\|dAs\|dTs\|dGs\|5mCs\|dAs\|dAs\|5mCs\|dTs\|oTs\|oG] |
| 3530 | [oGs\|oGs\|dTs\|dAs\|dAs\|dTs\|5mCs\|dAs\|dAs\|dTs\|dGs\|5mCs\|oAs\|oAs\|o5mCs\|oTs\|oTs\|LGs\|oT] |
| 3531 | [oGs\|oGs\|dTs\|dAs\|dAs\|dTs\|5mCs\|dAs\|dAs\|dTs\|dGs\|5mCs\|oAs\|oAs\|o5mCs\|oTs\|LTs\|oGs\|oT] |
| 3532 | [oGs\|oGs\|dTs\|dAs\|dAs\|dTs\|5mCs\|dAs\|dAs\|dTs\|dGs\|5mCs\|oAs\|oAs\|o5mCs\|LTs\|oTs\|oGs\|oT] |
| 3533 | [oGs\|oGs\|dTs\|dAs\|dAs\|dTs\|5mCs\|dAs\|dAs\|dTs\|dGs\|5mCs\|oAs\|oAs\|L5mCs\|oTs\|oTs\|oGs\|oT] |
| 3534 | [oGs\|oGs\|dTs\|dAs\|dAs\|dTs\|5mCs\|dAs\|dAs\|dTs\|dGs\|5mCs\|oAs\|LAs\|o5mCs\|oTs\|oTs\|oGs\|oT] |
| 3535 | [oTs\|LGs\|oGs\|oTs\|oAs\|oAs\|dTs\|5mCs\|dAs\|dAs\|dTs\|dGs\|5mCs\|dAs\|dAs\|5mCs\|oTs\|oTs\|oGs\|oT] |
| 3536 | [oTs\|oGs\|LGs\|oTs\|oAs\|oAs\|dTs\|5mCs\|dAs\|dAs\|dTs\|dGs\|5mCs\|dAs\|dAs\|5mCs\|oTs\|oTs\|oGs\|oT] |
| 3537 | [oTs\|oGs\|oGs\|LTs\|oAs\|oAs\|dTs\|5mCs\|dAs\|dAs\|dTs\|dGs\|5mCs\|dAs\|dAs\|5mCs\|oTs\|oTs\|oGs\|oT] |
| 3538 | [oTs\|oGs\|oGs\|oTs\|LAs\|oAs\|dTs\|5mCs\|dAs\|dAs\|dTs\|dGs\|5mCs\|dAs\|dAs\|5mCs\|oTs\|oTs\|oGs\|oT] |
| 3539 | [oTs\|oGs\|oGs\|oTs\|dAs\|dAs\|dTs\|5mCs\|dAs\|dAs\|dTs\|dGs\|5mCs\|dAs\|oAs\|o5mCs\|oTs\|oTs\|LGs\|oT] |
| 3540 | [oTs\|oGs\|oGs\|oTs\|dAs\|dAs\|dTs\|5mCs\|dAs\|dAs\|dTs\|dGs\|5mCs\|dAs\|oAs\|o5mCs\|oTs\|LTs\|oGs\|oT] |
| 3541 | [oTs\|oGs\|oGs\|oTs\|dAs\|dAs\|dTs\|5mCs\|dAs\|dAs\|dTs\|dGs\|5mCs\|dAs\|oAs\|o5mCs\|LTs\|oTs\|oGs\|oT] |
| 3542 | [oTs\|oGs\|oGs\|oTs\|dAs\|dAs\|dTs\|5mCs\|dAs\|dAs\|dTs\|dGs\|5mCs\|dAs\|oAs\|L5mCs\|oTs\|oTs\|oGs\|oT] |
| 3543 | [oTs\|LGs\|oGs\|oTs\|oAs\|oAs\|dTs\|5mCs\|dAs\|dAs\|dTs\|dGs\|5mCs\|dAs\|dAs\|5mCs\|oTs\|oTs\|oG] |
| 3544 | [oTs\|oGs\|LGs\|oTs\|oAs\|oAs\|dTs\|5mCs\|dAs\|dAs\|dTs\|dGs\|5mCs\|dAs\|dAs\|5mCs\|oTs\|oTs\|oG] |
| 3545 | [oTs\|oGs\|oGs\|LTs\|oAs\|oAs\|dTs\|5mCs\|dAs\|dAs\|dTs\|dGs\|5mCs\|dAs\|dAs\|5mCs\|oTs\|oTs\|oG] |
| 3546 | [oTs\|oGs\|oGs\|oTs\|LAs\|oAs\|dTs\|5mCs\|dAs\|dAs\|dTs\|dGs\|5mCs\|dAs\|dAs\|5mCs\|oTs\|oTs\|oG] |
| 3547 | [oTs\|oGs\|oGs\|dTs\|dAs\|dAs\|dTs\|5mCs\|dAs\|dAs\|dTs\|dGs\|5mCs\|dAs\|oAs\|o5mCs\|oTs\|oTs\|LGs\|oT] |
| 3548 | [oTs\|oGs\|oGs\|dTs\|dAs\|dAs\|dTs\|5mCs\|dAs\|dAs\|dTs\|dGs\|5mCs\|dAs\|oAs\|o5mCs\|oTs\|LTs\|oGs\|oT] |
| 3549 | [oTs\|oGs\|oGs\|dTs\|dAs\|dAs\|dTs\|5mCs\|dAs\|dAs\|dTs\|dGs\|5mCs\|dAs\|oAs\|o5mCs\|LTs\|oTs\|oGs\|oT] |
| 3550 | [oTs\|LGs\|oGs\|oTs\|oAs\|oAs\|dTs\|5mCs\|dAs\|dAs\|dTs\|dGs\|5mCs\|dAs\|dAs\|5mCs\|oTs\|oT] |
| 3551 | [oTs\|oGs\|LGs\|oTs\|oAs\|oAs\|dTs\|5mCs\|dAs\|dAs\|dTs\|dGs\|5mCs\|dAs\|dAs\|5mCs\|oTs\|oT] |
| 3552 | [oTs\|oGs\|oGs\|LTs\|oAs\|oAs\|dTs\|5mCs\|dAs\|dAs\|dTs\|dGs\|5mCs\|dAs\|dAs\|5mCs\|oTs\|oT] |
| 3553 | [oTs\|oGs\|oGs\|oTs\|LAs\|oAs\|dTs\|5mCs\|dAs\|dAs\|dTs\|dGs\|5mCs\|dAs\|dAs\|5mCs\|oTs\|oT] |
| 3554 | [oGs\|oTs\|dAs\|dAs\|dTs\|5mCs\|dAs\|dAs\|dTs\|dGs\|5mCs\|dAs\|oAs\|o5mCs\|oTs\|oTs\|LGs\|oT] |
| 3555 | [oGs\|oTs\|dAs\|dAs\|dTs\|5mCs\|dAs\|dAs\|dTs\|dGs\|5mCs\|dAs\|oAs\|o5mCs\|oTs\|LTs\|oGs\|oT] |
| 3556 | [oGs\|oTs\|dAs\|dAs\|dTs\|5mCs\|dAs\|dAs\|dTs\|dGs\|5mCs\|dAs\|oAs\|o5mCs\|LTs\|oTs\|oGs\|oT] |
| 3557 | [oGs\|oTs\|dAs\|dAs\|dTs\|5mCs\|dAs\|dAs\|dTs\|dGs\|5mCs\|dAs\|oAs\|L5mCs\|oTs\|oTs\|oGs\|oT] |
| 3558 | [oTs\|LGs\|oGs\|oTs\|oAs\|dAs\|dTs\|5mCs\|dAs\|dAs\|dTs\|dGs\|5mCs\|dAs\|dAs\|o5mCs\|oTs\|oTs\|oGs\|oT] |
| 3559 | [oTs\|oGs\|LGs\|oTs\|oAs\|dAs\|dTs\|5mCs\|dAs\|dAs\|dTs\|dGs\|5mCs\|dAs\|dAs\|o5mCs\|oTs\|oTs\|oGs\|oT] |
| 3560 | [oTs\|oGs\|oGs\|LTs\|oAs\|dAs\|dTs\|5mCs\|dAs\|dAs\|dTs\|dGs\|5mCs\|dAs\|dAs\|o5mCs\|oTs\|oTs\|oGs\|oT] |
| 3561 | [oTs\|oGs\|oGs\|oTs\|oAs\|dAs\|dTs\|5mCs\|dAs\|dAs\|dTs\|dGs\|5mCs\|dAs\|dAs\|o5mCs\|oTs\|oTs\|LGs\|oT] |
| 3562 | [oTs\|oGs\|oGs\|oTs\|oAs\|dAs\|dTs\|5mCs\|dAs\|dAs\|dTs\|dGs\|5mCs\|dAs\|dAs\|o5mCs\|oTs\|LTs\|oGs\|oT] |
| 3563 | [oTs\|oGs\|oGs\|oTs\|oAs\|dAs\|dTs\|5mCs\|dAs\|dAs\|dTs\|dGs\|5mCs\|dAs\|dAs\|o5mCs\|LTs\|oTs\|oGs\|oT] |
| 3564 | [oTs\|LGs\|oGs\|oTs\|oAs\|dAs\|dTs\|5mCs\|dAs\|dAs\|dTs\|dGs\|5mCs\|dAs\|dAs\|o5mCs\|oTs\|oTs\|oG] |
| 3565 | [oTs\|oGs\|LGs\|oTs\|oAs\|dAs\|dTs\|5mCs\|dAs\|dAs\|dTs\|dGs\|5mCs\|dAs\|dAs\|o5mCs\|oTs\|oTs\|oG] |
| 3566 | [oTs\|oGs\|oGs\|LTs\|oAs\|dAs\|dTs\|5mCs\|dAs\|dAs\|dTs\|dGs\|5mCs\|dAs\|dAs\|o5mCs\|oTs\|oTs\|oG] |
| 3567 | [oGs\|oGs\|oTs\|oAs\|dAs\|dTs\|5mCs\|dAs\|dAs\|dTs\|dGs\|5mCs\|dAs\|dAs\|o5mCs\|oTs\|oTs\|LGs\|oT] |
| 3568 | [oGs\|oGs\|oTs\|oAs\|dAs\|dTs\|5mCs\|dAs\|dAs\|dTs\|dGs\|5mCs\|dAs\|dAs\|o5mCs\|oTs\|LTs\|oGs\|oT] |
| 3569 | [oGs\|oGs\|oTs\|oAs\|dAs\|dTs\|5mCs\|dAs\|dAs\|dTs\|dGs\|5mCs\|dAs\|dAs\|o5mCs\|LTs\|oTs\|oGs\|oT] |
| 3570 | [oTs\|LGs\|oGs\|oTs\|oAs\|dAs\|dTs\|5mCs\|dAs\|dAs\|dTs\|dGs\|5mCs\|dAs\|dAs\|o5mCs\|oTs\|oT] |
| 3571 | [oTs\|oGs\|LGs\|oTs\|oAs\|dAs\|dTs\|5mCs\|dAs\|dAs\|dTs\|dGs\|5mCs\|dAs\|dAs\|o5mCs\|oTs\|oT] |
| 3572 | [oTs\|oGs\|oGs\|LTs\|oAs\|dAs\|dTs\|5mCs\|dAs\|dAs\|dTs\|dGs\|5mCs\|dAs\|dAs\|o5mCs\|oTs\|oT] |
| 3573 | [oGs\|oTs\|oAs\|dAs\|dTs\|5mCs\|dAs\|dAs\|dTs\|dGs\|5mCs\|dAs\|dAs\|o5mCs\|oTs\|oTs\|LGs\|oT] |
| 3574 | [oGs\|oTs\|oAs\|dAs\|dTs\|5mCs\|dAs\|dAs\|dTs\|dGs\|5mCs\|dAs\|dAs\|o5mCs\|oTs\|LTs\|oGs\|oT] |
| 3575 | [oGs\|oTs\|oAs\|dAs\|dTs\|5mCs\|dAs\|dAs\|dTs\|dGs\|5mCs\|dAs\|dAs\|o5mCs\|LTs\|oTs\|oGs\|oT] |
| 3576 | [oTs\|LGs\|oGs\|oTs\|oAs\|dAs\|dTs\|5mCs\|dAs\|dAs\|dTs\|dGs\|5mCs\|dAs\|dAs\|o5mCs\|oT] |
| 3577 | [oTs\|oGs\|LGs\|oTs\|oAs\|dAs\|dTs\|5mCs\|dAs\|dAs\|dTs\|dGs\|5mCs\|dAs\|dAs\|o5mCs\|oT] |
| 3578 | [oTs\|oGs\|oGs\|LTs\|oAs\|dAs\|dTs\|5mCs\|dAs\|dAs\|dTs\|dGs\|5mCs\|dAs\|dAs\|o5mCs\|oT] |
| 3579 | [oTs\|oAs\|dAs\|dTs\|5mCs\|dAs\|dAs\|dTs\|dGs\|5mCs\|dAs\|dAs\|o5mCs\|oTs\|oTs\|LGs\|oT] |
| 3580 | [oTs\|oAs\|dAs\|dTs\|5mCs\|dAs\|dAs\|dTs\|dGs\|5mCs\|dAs\|dAs\|o5mCs\|oTs\|LTs\|oGs\|oT] |
| 3581 | [oTs\|oAs\|dAs\|dTs\|5mCs\|dAs\|dAs\|dTs\|dGs\|5mCs\|dAs\|dAs\|o5mCs\|LTs\|oTs\|oGs\|oT] |
| 3582 | [oGs\|LGs\|oTs\|oAs\|dAs\|dTs\|5mCs\|dAs\|dAs\|dTs\|dGs\|5mCs\|dAs\|dAs\|o5mCs\|oTs\|oTs\|oGs\|oT] |
| 3583 | [oGs\|oGs\|LTs\|oAs\|dAs\|dTs\|5mCs\|dAs\|dAs\|dTs\|dGs\|5mCs\|dAs\|dAs\|o5mCs\|oTs\|oTs\|oGs\|oT] |
| 3584 | [oTs\|oGs\|oGs\|oTs\|oAs\|dAs\|dTs\|5mCs\|dAs\|dAs\|dTs\|dGs\|5mCs\|dAs\|dAs\|o5mCs\|oTs\|LTs\|oG] |
| 3585 | [oTs\|oGs\|oGs\|oTs\|oAs\|dAs\|dTs\|5mCs\|dAs\|dAs\|dTs\|dGs\|5mCs\|dAs\|dAs\|o5mCs\|LTs\|oTs\|oG] |
| 3586 | [oGs\|LGs\|oTs\|oAs\|dAs\|dTs\|5mCs\|dAs\|dAs\|dTs\|dGs\|5mCs\|dAs\|dAs\|o5mCs\|oTs\|oTs\|oG] |
| 3587 | [oGs\|oGs\|LTs\|oAs\|dAs\|dTs\|5mCs\|dAs\|dAs\|dTs\|dGs\|5mCs\|dAs\|dAs\|o5mCs\|oTs\|oTs\|oG] |
| 3588 | [oGs\|oGs\|oTs\|oAs\|dAs\|dTs\|5mCs\|dAs\|dAs\|dTs\|dGs\|5mCs\|dAs\|dAs\|o5mCs\|oTs\|LTs\|oG] |
| 3589 | [oGs\|oGs\|oTs\|oAs\|dAs\|dTs\|5mCs\|dAs\|dAs\|dTs\|dGs\|5mCs\|dAs\|dAs\|o5mCs\|LTs\|oTs\|oG] |
| 3590 | [oGs\|LGs\|oTs\|oAs\|dAs\|dTs\|5mCs\|dAs\|dAs\|dTs\|dGs\|5mCs\|dAs\|dAs\|o5mCs\|oTs\|oT] |
| 3591 | [oGs\|oGs\|LTs\|oAs\|dAs\|dTs\|5mCs\|dAs\|dAs\|dTs\|dGs\|5mCs\|dAs\|dAs\|o5mCs\|oTs\|oT] |
| 3592 | [oGs\|oGs\|oTs\|oAs\|dAs\|dTs\|5mCs\|dAs\|dAs\|dTs\|dGs\|5mCs\|dAs\|dAs\|o5mCs\|LTs\|oT] |
| 3593 | [oTs\|oGs\|oGs\|oTs\|oAs\|oAs\|oTs\|o5mCs\|dAs\|dAs\|dTs\|dGs\|5mCs\|dAs\|dAs\|5mCs\|dTs\|dTs\|oGs\|oT] |
| 3594 | [oTs\|oGs\|dGs\|dTs\|dAs\|dAs\|dTs\|5mCs\|dAs\|dAs\|dTs\|dGs\|o5mCs\|oAs\|oAs\|o5mCs\|oTs\|oTs\|oGs\|oT] |
| 3595 | [oTs\|oGs\|oGs\|oTs\|oAs\|oAs\|oTs\|5mCs\|dAs\|dAs\|dTs\|dGs\|5mCs\|dAs\|dAs\|5mCs\|dTs\|oTs\|oGs\|oT] |
| 3596 | [oTs\|oGs\|oGs\|dTs\|dAs\|dAs\|dTs\|5mCs\|dAs\|dAs\|dTs\|dGs\|5mCs\|oAs\|oAs\|o5mCs\|oTs\|oTs\|oGs\|oT] |
| 3597 | [oTs\|oGs\|oGs\|oTs\|oAs\|oAs\|oTs\|5mCs\|dAs\|dAs\|dTs\|dGs\|5mCs\|dAs\|dAs\|5mCs\|dTs\|oTs\|oG] |
| 3598 | [oGs\|oGs\|dTs\|dAs\|dAs\|dTs\|5mCs\|dAs\|dAs\|dTs\|dGs\|5mCs\|oAs\|oAs\|o5mCs\|oTs\|oTs\|oGs\|oT] |
| 3599 | [oTs\|oGs\|oGs\|oTs\|oAs\|oAs\|dTs\|5mCs\|dAs\|dAs\|dTs\|dGs\|5mCs\|dAs\|dAs\|5mCs\|oTs\|oTs\|oGs\|oT] |
| 3600 | [oTs\|oGs\|oGs\|oTs\|dAs\|dAs\|dTs\|5mCs\|dAs\|dAs\|dTs\|dGs\|5mCs\|dAs\|oAs\|o5mCs\|oTs\|oTs\|oGs\|oT] |
| 3601 | [oTs\|oGs\|oGs\|oTs\|oAs\|oAs\|dTs\|5mCs\|dAs\|dAs\|dTs\|dGs\|5mCs\|dAs\|dAs\|5mCs\|oTs\|oTs\|oG] |
| 3602 | [oTs\|oGs\|oGs\|dTs\|dAs\|dAs\|dTs\|5mCs\|dAs\|dAs\|dTs\|dGs\|5mCs\|dAs\|oAs\|o5mCs\|oTs\|oTs\|oGs\|oT] |
| 3603 | [oTs\|oGs\|oGs\|oTs\|oAs\|oAs\|dTs\|5mCs\|dAs\|dAs\|dTs\|dGs\|5mCs\|dAs\|dAs\|5mCs\|oTs\|oT] |
| 3604 | [oGs\|oTs\|dAs\|dAs\|dTs\|5mCs\|dAs\|dAs\|dTs\|dGs\|5mCs\|dAs\|oAs\|o5mCs\|oTs\|oTs\|oGs\|oT] |
| 3605 | [oTs\|oGs\|oGs\|oTs\|oAs\|dAs\|dTs\|5mCs\|dAs\|dAs\|dTs\|dGs\|5mCs\|dAs\|dAs\|o5mCs\|oTs\|oTs\|oGs\|oT] |
| 3606 | [oTs\|oGs\|oGs\|oTs\|oAs\|dAs\|dTs\|5mCs\|dAs\|dAs\|dTs\|dGs\|5mCs\|dAs\|dAs\|o5mCs\|oTs\|oTs\|oG] |
| 3607 | [oTs\|oGs\|oGs\|oTs\|oAs\|dAs\|dTs\|5mCs\|dAs\|dAs\|dTs\|dGs\|5mCs\|dAs\|dAs\|o5mCs\|oTs\|oT] |
| 3608 | [oGs\|oTs\|oAs\|dAs\|dTs\|5mCs\|dAs\|dAs\|dTs\|dGs\|5mCs\|dAs\|dAs\|o5mCs\|oTs\|oTs\|oGs\|oT] |
| 3609 | [oTs\|oGs\|oGs\|oTs\|oAs\|dAs\|dTs\|5mCs\|dAs\|dAs\|dTs\|dGs\|5mCs\|dAs\|dAs\|o5mCs\|oT] |
| 3610 | [oTs\|oAs\|dAs\|dTs\|5mCs\|dAs\|dAs\|dTs\|dGs\|5mCs\|dAs\|dAs\|o5mCs\|oTs\|oTs\|oGs\|oT] |
| 3611 | [oGs\|oGs\|oTs\|oAs\|dAs\|dTs\|5mCs\|dAs\|dAs\|dTs\|dGs\|5mCs\|dAs\|dAs\|o5mCs\|oTs\|oTs\|oGs\|oT] |
| 3612 | [oGs\|oGs\|oTs\|oAs\|dAs\|dTs\|5mCs\|dAs\|dAs\|dTs\|dGs\|5mCs\|dAs\|dAs\|o5mCs\|oTs\|oTs\|oG] |
| 3613 | [oGs\|oGs\|oTs\|oAs\|dAs\|dTs\|5mCs\|dAs\|dAs\|dTs\|dGs\|5mCs\|dAs\|dAs\|o5mCs\|oTs\|oT] |
| 3614 | [oTs\|oGs\|oGp\|oTs\|oAs\|dAs\|dTs\|5mCs\|dAs\|dAs\|dTs\|dGs\|5mCs\|dAs\|dAs\|o5mCs\|oTs\|oTs\|oGs\|oT] |
| 3615 | [oTs\|oGs\|oGs\|oTp\|oAs\|dAs\|dTs\|5mCs\|dAs\|dAs\|dTs\|dGs\|5mCs\|dAs\|dAs\|o5mCs\|oTs\|oTs\|oGs\|oT] |
| 3616 | [oTs\|oGs\|oGp\|oTp\|oAs\|dAs\|dTs\|5mCs\|dAs\|dAs\|dTs\|dGs\|5mCs\|dAs\|dAs\|o5mCs\|oTs\|oTs\|oGs\|oT] |
| 3617 | [oTs\|oGs\|oGs\|oTs\|oAs\|dAs\|dTs\|5mCs\|dAs\|dAs\|dTs\|dGs\|5mCs\|dAs\|dAs\|o5mCs\|oTp\|oTs\|oGs\|oT] |
| 3618 | [oTs\|oGs\|oGs\|oTs\|oAs\|dAs\|dTs\|5mCs\|dAs\|dAs\|dTs\|dGs\|5mCs\|dAs\|dAs\|o5mCp\|oTs\|oTs\|oGs\|oT] |
| 3619 | [oTs\|oGs\|oGs\|oTs\|oAs\|dAs\|dTs\|5mCs\|dAs\|dAs\|dTs\|dGs\|5mCs\|dAs\|dAs\|o5mCp\|oTp\|oTs\|oGs\|oT] |
| 3620 | [oTs\|oGs\|oGp\|oTs\|oAs\|dAs\|dTs\|5mCs\|dAs\|dAs\|dTs\|dGs\|5mCs\|dAs\|dAs\|o5mCs\|oTp\|oTs\|oGs\|oT] |
| 3621 | [oTs\|oGs\|oGp\|oTs\|oAs\|dAs\|dTs\|5mCs\|dAs\|dAs\|dTs\|dGs\|5mCs\|dAs\|dAs\|o5mCp\|oTs\|oTs\|oGs\|oT] |
| 3622 | [oTs\|oGs\|oGs\|oTp\|oAs\|dAs\|dTs\|5mCs\|dAs\|dAs\|dTs\|dGs\|5mCs\|dAs\|dAs\|o5mCs\|oTp\|oTs\|oGs\|oT] |
| 3623 | [oTs\|oGs\|oGs\|oTp\|oAs\|dAs\|dTs\|5mCs\|dAs\|dAs\|dTs\|dGs\|5mCs\|dAs\|dAs\|o5mCp\|oTs\|oTs\|oGs\|oT] |
| 3624 | [oTs\|oGs\|oGp\|oTs\|oAs\|dAs\|dTs\|5mCs\|dAs\|dAs\|dTs\|dGs\|5mCs\|dAs\|dAs\|o5mCp\|oTp\|oTs\|oGs\|oT] |
| 3625 | [oTs\|oGs\|oGs\|oTp\|oAs\|dAs\|dTs\|5mCs\|dAs\|dAs\|dTs\|dGs\|5mCs\|dAs\|dAs\|o5mCp\|oTp\|oTs\|oGs\|oT] |
| 3626 | [oTs\|oGs\|oGp\|oTp\|oAs\|dAs\|dTs\|5mCs\|dAs\|dAs\|dTs\|dGs\|5mCs\|dAs\|dAs\|o5mCs\|oTp\|oTs\|oGs\|oT] |
| 3627 | [oTs\|oGs\|oGp\|oTp\|oAs\|dAs\|dTs\|5mCs\|dAs\|dAs\|dTs\|dGs\|5mCs\|dAs\|dAs\|o5mCp\|oTs\|oTs\|oGs\|oT] |
| 3628 | [oTs\|oGs\|oGp\|oTp\|oAs\|dAs\|dTs\|5mCs\|dAs\|dAs\|dTs\|dGs\|5mCs\|dAs\|dAs\|o5mCp\|oTp\|oTs\|oGs\|oT] |
| 3629 | [oTs\|oGs\|oGs\|oTs\|oAs\|dAs\|dTs\|5mCs\|dAs\|dAs\|dTs\|dGs\|5mCs\|dAs\|dAs\|o5mCs\|oTs\|oTs\|oGs\|oTs\|oT] |
| 3630 | [oTs\|oGs\|oGp\|oTs\|oAs\|dAs\|dTs\|5mCs\|dAs\|dAs\|dTs\|dGs\|5mCs\|dAs\|dAs\|o5mCs\|oTs\|oTs\|oGs\|oTs\|oT] |
| 3631 | [oTs\|oGs\|oGs\|oTp\|oAs\|dAs\|dTs\|5mCs\|dAs\|dAs\|dTs\|dGs\|5mCs\|dAs\|dAs\|o5mCs\|oTs\|oTs\|oGs\|oTs\|oT] |
| 3632 | [oTs\|oGs\|oGp\|oTp\|oAs\|dAs\|dTs\|5mCs\|dAs\|dAs\|dTs\|dGs\|5mCs\|dAs\|dAs\|o5mCs\|oTs\|oTs\|oGs\|oTs\|oT] |
| 3633 | [oTs\|oGs\|oGs\|oTs\|oAs\|dAs\|dTs\|5mCs\|dAs\|dAs\|dTs\|dGs\|5mCs\|dAs\|dAs\|o5mCs\|oTp\|oTs\|oGs\|oTs\|oT] |
| 3634 | [oTs\|oGs\|oGs\|oTs\|oAs\|dAs\|dTs\|5mCs\|dAs\|dAs\|dTs\|dGs\|5mCs\|dAs\|dAs\|o5mCp\|oTs\|oTs\|oGs\|oTs\|oT] |
| 3635 | [oTs\|oGs\|oGs\|oTs\|oAs\|dAs\|dTs\|5mCs\|dAs\|dAs\|dTs\|dGs\|5mCs\|dAs\|dAs\|o5mCp\|oTp\|oTs\|oGs\|oTs\|oT] |
| 3636 | [oTs\|oGs\|oGp\|oTs\|oAs\|dAs\|dTs\|5mCs\|dAs\|dAs\|dTs\|dGs\|5mCs\|dAs\|dAs\|o5mCs\|oTp\|oTs\|oGs\|oTs\|oT] |
| 3637 | [oTs\|oGs\|oGp\|oTs\|oAs\|dAs\|dTs\|5mCs\|dAs\|dAs\|dTs\|dGs\|5mCs\|dAs\|dAs\|o5mCp\|oTs\|oTs\|oGs\|oTs\|oT] |
| 3638 | [oTs\|oGs\|oGs\|oTp\|oAs\|dAs\|dTs\|5mCs\|dAs\|dAs\|dTs\|dGs\|5mCs\|dAs\|dAs\|o5mCs\|oTp\|oTs\|oGs\|oTs\|oT] |
| 3639 | [oTs\|oGs\|oGs\|oTp\|oAs\|dAs\|dTs\|5mCs\|dAs\|dAs\|dTs\|dGs\|5mCs\|dAs\|dAs\|o5mCp\|oTs\|oTs\|oGs\|oTs\|oT] |
| 3640 | [oTs\|oGs\|oGp\|oTs\|oAs\|dAs\|dTs\|5mCs\|dAs\|dAs\|dTs\|dGs\|5mCs\|dAs\|dAs\|o5mCp\|oTp\|oTs\|oGs\|oTs\|oT] |
| 3641 | [oTs\|oGs\|oGs\|oTp\|oAs\|dAs\|dTs\|5mCs\|dAs\|dAs\|dTs\|dGs\|5mCs\|dAs\|dAs\|o5mCp\|oTp\|oTs\|oGs\|oTs\|oT] |
| 3642 | [oTs\|oGs\|oGp\|oTp\|oAs\|dAs\|dTs\|5mCs\|dAs\|dAs\|dTs\|dGs\|5mCs\|dAs\|dAs\|o5mCs\|oTp\|oTs\|oGs\|oTs\|oT] |
| 3643 | [oTs\|oGs\|oGp\|oTp\|oAs\|dAs\|dTs\|5mCs\|dAs\|dAs\|dTs\|dGs\|5mCs\|dAs\|dAs\|o5mCp\|oTs\|oTs\|oGs\|oTs\|oT] |
| 3644 | [oTs\|oGs\|oGp\|oTp\|oAs\|dAs\|dTs\|5mCs\|dAs\|dAs\|dTs\|dGs\|5mCs\|dAs\|dAs\|o5mCp\|oTp\|oTs\|oGs\|oTs\|oT] |
| 3645 | [oTs\|oGs\|oGs\|oTs\|oAs\|dAs\|dTs\|5mCs\|dAs\|dAs\|dTs\|dGs\|5mCs\|dAs\|dAs\|o5mCs\|oTs\|oTs\|oGs\|oTs\|oTs\|oT] |
| 3646 | [oTs\|oGs\|oGp\|oTs\|oAs\|dAs\|dTs\|5mCs\|dAs\|dAs\|dTs\|dGs\|5mCs\|dAs\|dAs\|o5mCs\|oTs\|oTs\|oGs\|oTs\|oTs\|oT] |
| 3647 | [oTs\|oGs\|oGs\|oTp\|oAs\|dAs\|dTs\|5mCs\|dAs\|dAs\|dTs\|dGs\|5mCs\|dAs\|dAs\|o5mCs\|oTs\|oTs\|oGs\|oTs\|oTs\|oT] |
| 3648 | [oTs\|oGs\|oGp\|oTp\|oAs\|dAs\|dTs\|5mCs\|dAs\|dAs\|dTs\|dGs\|5mCs\|dAs\|dAs\|o5mCs\|oTs\|oTs\|oGs\|oTs\|oTs\|oT] |
| 3649 | [oTs\|oGs\|oGs\|oTs\|oAs\|dAs\|dTs\|5mCs\|dAs\|dAs\|dTs\|dGs\|5mCs\|dAs\|dAs\|o5mCs\|oTp\|oTs\|oGs\|oTs\|oTs\|oT] |
| 3650 | [oTs\|oGs\|oGs\|oTs\|oAs\|dAs\|dTs\|5mCs\|dAs\|dAs\|dTs\|dGs\|5mCs\|dAs\|dAs\|o5mCp\|oTs\|oTs\|oGs\|oTs\|oTs\|oT] |
| 3651 | [oTs\|oGs\|oGs\|oTs\|oAs\|dAs\|dTs\|5mCs\|dAs\|dAs\|dTs\|dGs\|5mCs\|dAs\|dAs\|o5mCp\|oTp\|oTs\|oGs\|oTs\|oTs\|oT] |
| 3652 | [oTs\|oGs\|oGp\|oTs\|oAs\|dAs\|dTs\|5mCs\|dAs\|dAs\|dTs\|dGs\|5mCs\|dAs\|dAs\|o5mCs\|oTp\|oTs\|oGs\|oTs\|oTs\|oT] |
| 3653 | [oTs\|oGs\|oGp\|oTs\|oAs\|dAs\|dTs\|5mCs\|dAs\|dAs\|dTs\|dGs\|5mCs\|dAs\|dAs\|o5mCp\|oTs\|oTs\|oGs\|oTs\|oTs\|oT] |
| 3654 | [oTs\|oGs\|oGs\|oTp\|oAs\|dAs\|dTs\|5mCs\|dAs\|dAs\|dTs\|dGs\|5mCs\|dAs\|dAs\|o5mCs\|oTp\|oTs\|oGs\|oTs\|oTs\|oT] |
| 3655 | [oTs\|oGs\|oGs\|oTp\|oAs\|dAs\|dTs\|5mCs\|dAs\|dAs\|dTs\|dGs\|5mCs\|dAs\|dAs\|o5mCp\|oTs\|oTs\|oGs\|oTs\|oTs\|oT] |
| 3656 | [oTs\|oGs\|oGp\|oTs\|oAs\|dAs\|dTs\|5mCs\|dAs\|dAs\|dTs\|dGs\|5mCs\|dAs\|dAs\|o5mCp\|oTp\|oTs\|oGs\|oTs\|oTs\|oT] |
| 3657 | [oTs\|oGs\|oGs\|oTp\|oAs\|dAs\|dTs\|5mCs\|dAs\|dAs\|dTs\|dGs\|5mCs\|dAs\|dAs\|o5mCp\|oTp\|oTs\|oGs\|oTs\|oTs\|oT] |
| 3658 | [oTs\|oGs\|oGp\|oTp\|oAs\|dAs\|dTs\|5mCs\|dAs\|dAs\|dTs\|dGs\|5mCs\|dAs\|dAs\|o5mCs\|oTp\|oTs\|oGs\|oTs\|oTs\|oT] |
| 3659 | [oTs\|oGs\|oGp\|oTp\|oAs\|dAs\|dTs\|5mCs\|dAs\|dAs\|dTs\|dGs\|5mCs\|dAs\|dAs\|o5mCp\|oTs\|oTs\|oGs\|oTs\|oTs\|oT] |
| 3660 | [oTs\|oGs\|oGp\|oTp\|oAs\|dAs\|dTs\|5mCs\|dAs\|dAs\|dTs\|dGs\|5mCs\|dAs\|dAs\|o5mCp\|oTp\|oTs\|oGs\|oTs\|oTs\|oT] |
| 3661 | [oTs\|oGs\|oGs\|oTs\|oAs\|dAs\|dTs\|5mCs\|dAs\|dAs\|dTs\|dGs\|5mCs\|dAs\|dAs\|o5mCs\|oTs\|oTs\|oGs\|oTs\|oTs\|oTs\|oT] |
| 3662 | [oTs\|oGs\|oGp\|oTs\|oAs\|dAs\|dTs\|5mCs\|dAs\|dAs\|dTs\|dGs\|5mCs\|dAs\|dAs\|o5mCs\|oTs\|oTs\|oGs\|oTs\|oTs\|oTs\|oT] |
| 3663 | [oTs\|oGs\|oGs\|oTp\|oAs\|dAs\|dTs\|5mCs\|dAs\|dAs\|dTs\|dGs\|5mCs\|dAs\|dAs\|o5mCs\|oTs\|oTs\|oGs\|oTs\|oTs\|oTs\|oT] |
| 3664 | [oTs\|oGs\|oGp\|oTp\|oAs\|dAs\|dTs\|5mCs\|dAs\|dAs\|dTs\|dGs\|5mCs\|dAs\|dAs\|o5mCs\|oTs\|oTs\|oGs\|oTs\|oTs\|oTs\|oT] |
| 3665 | [oTs\|oGs\|oGs\|oTs\|oAs\|dAs\|dTs\|5mCs\|dAs\|dAs\|dTs\|dGs\|5mCs\|dAs\|dAs\|o5mCs\|oTp\|oTs\|oGs\|oTs\|oTs\|oTs\|oT] |
| 3666 | [oTs\|oGs\|oGs\|oTs\|oAs\|dAs\|dTs\|5mCs\|dAs\|dAs\|dTs\|dGs\|5mCs\|dAs\|dAs\|o5mCp\|oTs\|oTs\|oGs\|oTs\|oTs\|oTs\|oT] |
| 3667 | [oTs\|oGs\|oGs\|oTs\|oAs\|dAs\|dTs\|5mCs\|dAs\|dAs\|dTs\|dGs\|5mCs\|dAs\|dAs\|o5mCp\|oTp\|oTs\|oGs\|oTs\|oTs\|oTs\|oT] |
| 3668 | [oTs\|oGs\|oGp\|oTs\|oAs\|dAs\|dTs\|5mCs\|dAs\|dAs\|dTs\|dGs\|5mCs\|dAs\|dAs\|o5mCs\|oTp\|oTs\|oGs\|oTs\|oTs\|oTs\|oT] |
| 3669 | [oTs\|oGs\|oGp\|oTs\|oAs\|dAs\|dTs\|5mCs\|dAs\|dAs\|dTs\|dGs\|5mCs\|dAs\|dAs\|o5mCp\|oTs\|oTs\|oGs\|oTs\|oTs\|oTs\|oT] |
| 3670 | [oTs\|oGs\|oGs\|oTp\|oAs\|dAs\|dTs\|5mCs\|dAs\|dAs\|dTs\|dGs\|5mCs\|dAs\|dAs\|o5mCs\|oTp\|oTs\|oGs\|oTs\|oTs\|oTs\|oT] |
| 3671 | [oTs\|oGs\|oGs\|oTp\|oAs\|dAs\|dTs\|5mCs\|dAs\|dAs\|dTs\|dGs\|5mCs\|dAs\|dAs\|o5mCp\|oTs\|oTs\|oGs\|oTs\|oTs\|oTs\|oT] |
| 3672 | [oTs\|oGs\|oGp\|oTs\|oAs\|dAs\|dTs\|5mCs\|dAs\|dAs\|dTs\|dGs\|5mCs\|dAs\|dAs\|o5mCp\|oTp\|oTs\|oGs\|oTs\|oTs\|oTs\|oT] |
| 3673 | [oTs\|oGs\|oGs\|oTp\|oAs\|dAs\|dTs\|5mCs\|dAs\|dAs\|dTs\|dGs\|5mCs\|dAs\|dAs\|o5mCp\|oTp\|oTs\|oGs\|oTs\|oTs\|oTs\|oT] |
| 3674 | [oTs\|oGs\|oGp\|oTp\|oAs\|dAs\|dTs\|5mCs\|dAs\|dAs\|dTs\|dGs\|5mCs\|dAs\|dAs\|o5mCs\|oTp\|oTs\|oGs\|oTs\|oTs\|oTs\|oT] |
| 3675 | [oTs\|oGs\|oGp\|oTp\|oAs\|dAs\|dTs\|5mCs\|dAs\|dAs\|dTs\|dGs\|5mCs\|dAs\|dAs\|o5mCp\|oTs\|oTs\|oGs\|oTs\|oTs\|oTs\|oT] |
| 3676 | [oTs\|oGs\|oGp\|oTp\|oAs\|dAs\|dTs\|5mCs\|dAs\|dAs\|dTs\|dGs\|5mCs\|dAs\|dAs\|o5mCp\|oTp\|oTs\|oGs\|oTs\|oTs\|oTs\|oT] |
| 3677 | [oTs\|oGs\|oGs\|oTs\|oAs\|dAs\|dTs\|5mCs\|dAs\|dAs\|dTs\|dGs\|5mCs\|dAs\|dAs\|5mCs\|oTs\|oTs\|oGs\|oTs\|oT] |
| 3678 | [oTs\|oGs\|oGp\|oTs\|oAs\|dAs\|dTs\|5mCs\|dAs\|dAs\|dTs\|dGs\|5mCs\|dAs\|dAs\|5mCs\|oTs\|oTs\|oGs\|oTs\|oT] |
| 3679 | [oTs\|oGs\|oGs\|oTp\|oAs\|dAs\|dTs\|5mCs\|dAs\|dAs\|dTs\|dGs\|5mCs\|dAs\|dAs\|5mCs\|oTs\|oTs\|oGs\|oTs\|oT] |
| 3680 | [oTs\|oGs\|oGp\|oTp\|oAs\|dAs\|dTs\|5mCs\|dAs\|dAs\|dTs\|dGs\|5mCs\|dAs\|dAs\|5mCs\|oTs\|oTs\|oGs\|oTs\|oT] |
| 3681 | [oTs\|oGs\|oGs\|oTs\|oAs\|dAs\|dTs\|5mCs\|dAs\|dAs\|dTs\|dGs\|5mCs\|dAs\|dAs\|5mCs\|oTp\|oTs\|oGs\|oTs\|oT] |
| 3682 | [oTs\|oGs\|oGs\|oTs\|oAs\|dAs\|dTs\|5mCs\|dAs\|dAs\|dTs\|dGs\|5mCs\|dAs\|dAs\|5mCp\|oTs\|oTs\|oGs\|oTs\|oT] |
| 3683 | [oTs\|oGs\|oGs\|oTs\|oAs\|dAs\|dTs\|5mCs\|dAs\|dAs\|dTs\|dGs\|5mCs\|dAs\|dAs\|5mCp\|oTp\|oTs\|oGs\|oTs\|oT] |
| 3684 | [oTs\|oGs\|oGp\|oTs\|oAs\|dAs\|dTs\|5mCs\|dAs\|dAs\|dTs\|dGs\|5mCs\|dAs\|dAs\|5mCs\|oTp\|oTs\|oGs\|oTs\|oT] |
| 3685 | [oTs\|oGs\|oGp\|oTs\|oAs\|dAs\|dTs\|5mCs\|dAs\|dAs\|dTs\|dGs\|5mCs\|dAs\|dAs\|5mCp\|oTs\|oTs\|oGs\|oTs\|oT] |
| 3686 | [oTs\|oGs\|oGs\|oTp\|oAs\|dAs\|dTs\|5mCs\|dAs\|dAs\|dTs\|dGs\|5mCs\|dAs\|dAs\|5mCs\|oTp\|oTs\|oGs\|oTs\|oT] |
| 3687 | [oTs\|oGs\|oGs\|oTp\|oAs\|dAs\|dTs\|5mCs\|dAs\|dAs\|dTs\|dGs\|5mCs\|dAs\|dAs\|5mCp\|oTs\|oTs\|oGs\|oTs\|oT] |
| 3688 | [oTs\|oGs\|oGp\|oTs\|oAs\|dAs\|dTs\|5mCs\|dAs\|dAs\|dTs\|dGs\|5mCs\|dAs\|dAs\|5mCp\|oTp\|oTs\|oGs\|oTs\|oT] |
| 3689 | [oTs\|oGs\|oGs\|oTp\|oAs\|dAs\|dTs\|5mCs\|dAs\|dAs\|dTs\|dGs\|5mCs\|dAs\|dAs\|5mCp\|oTp\|oTs\|oGs\|oTs\|oT] |
| 3690 | [oTs\|oGs\|oGp\|oTp\|oAs\|dAs\|dTs\|5mCs\|dAs\|dAs\|dTs\|dGs\|5mCs\|dAs\|dAs\|5mCs\|oTp\|oTs\|oGs\|oTs\|oT] |
| 3691 | [oTs\|oGs\|oGp\|oTp\|oAs\|dAs\|dTs\|5mCs\|dAs\|dAs\|dTs\|dGs\|5mCs\|dAs\|dAs\|5mCp\|oTs\|oTs\|oGs\|oTs\|oT] |
| 3692 | [oTs\|oGs\|oGp\|oTp\|oAs\|dAs\|dTs\|5mCs\|dAs\|dAs\|dTs\|dGs\|5mCs\|dAs\|dAs\|5mCp\|oTp\|oTs\|oGs\|oTs\|oT] |
| 3693 | [oTs\|oGs\|oGs\|oTs\|oAs\|dAs\|dTs\|5mCs\|dAs\|dAs\|dTs\|dGs\|5mCs\|dAs\|dAs\|5mCs\|dTs\|oTs\|oGs\|oTs\|oTs\|oT] |
| 3694 | [oTs\|oGs\|oGp\|oTs\|oAs\|dAs\|dTs\|5mCs\|dAs\|dAs\|dTs\|dGs\|5mCs\|dAs\|dAs\|5mCs\|dTs\|oTs\|oGs\|oTs\|oTs\|oT] |
| 3695 | [oTs\|oGs\|oGs\|oTp\|oAs\|dAs\|dTs\|5mCs\|dAs\|dAs\|dTs\|dGs\|5mCs\|dAs\|dAs\|5mCs\|dTs\|oTs\|oGs\|oTs\|oTs\|oT] |
| 3696 | [oTs\|oGs\|oGp\|oTp\|oAs\|dAs\|dTs\|5mCs\|dAs\|dAs\|dTs\|dGs\|5mCs\|dAs\|dAs\|5mCs\|dTs\|oTs\|oGs\|oTs\|oTs\|oT] |
| 3697 | [oTs\|oGs\|oGs\|oTs\|oAs\|dAs\|dTs\|5mCs\|dAs\|dAs\|dTs\|dGs\|5mCs\|dAs\|dAs\|5mCs\|dTp\|oTs\|oGs\|oTs\|oTs\|oT] |
| 3698 | [oTs\|oGs\|oGs\|oTs\|oAs\|dAs\|dTs\|5mCs\|dAs\|dAs\|dTs\|dGs\|5mCs\|dAs\|dAs\|5mCp\|dTs\|oTs\|oGs\|oTs\|oTs\|oT] |
| 3699 | [oTs\|oGs\|oGs\|oTs\|oAs\|dAs\|dTs\|5mCs\|dAs\|dAs\|dTs\|dGs\|5mCs\|dAs\|dAs\|5mCp\|dTp\|oTs\|oGs\|oTs\|oTs\|oT] |
| 3700 | [oTs\|oGs\|oGp\|oTs\|oAs\|dAs\|dTs\|5mCs\|dAs\|dAs\|dTs\|dGs\|5mCs\|dAs\|dAs\|5mCs\|dTp\|oTs\|oGs\|oTs\|oTs\|oT] |
| 3701 | [oTs\|oGs\|oGp\|oTs\|oAs\|dAs\|dTs\|5mCs\|dAs\|dAs\|dTs\|dGs\|5mCs\|dAs\|dAs\|5mCp\|dTs\|oTs\|oGs\|oTs\|oTs\|oT] |
| 3702 | [oTs\|oGs\|oGs\|oTp\|oAs\|dAs\|dTs\|5mCs\|dAs\|dAs\|dTs\|dGs\|5mCs\|dAs\|dAs\|5mCs\|dTp\|oTs\|oGs\|oTs\|oTs\|oT] |
| 3703 | [oTs\|oGs\|oGs\|oTp\|oAs\|dAs\|dTs\|5mCs\|dAs\|dAs\|dTs\|dGs\|5mCs\|dAs\|dAs\|5mCp\|dTs\|oTs\|oGs\|oTs\|oTs\|oT] |
| 3704 | [oTs\|oGs\|oGp\|oTs\|oAs\|dAs\|dTs\|5mCs\|dAs\|dAs\|dTs\|dGs\|5mCs\|dAs\|dAs\|5mCp\|dTp\|oTs\|oGs\|oTs\|oTs\|oT] |
| 3705 | [oTs\|oGs\|oGs\|oTp\|oAs\|dAs\|dTs\|5mCs\|dAs\|dAs\|dTs\|dGs\|5mCs\|dAs\|dAs\|5mCp\|dTp\|oTs\|oGs\|oTs\|oTs\|oT] |
| 3706 | [oTs\|oGs\|oGp\|oTp\|oAs\|dAs\|dTs\|5mCs\|dAs\|dAs\|dTs\|dGs\|5mCs\|dAs\|dAs\|5mCs\|dTp\|oTs\|oGs\|oTs\|oTs\|oT] |
| 3707 | [oTs\|oGs\|oGp\|oTp\|oAs\|dAs\|dTs\|5mCs\|dAs\|dAs\|dTs\|dGs\|5mCs\|dAs\|dAs\|5mCp\|dTs\|oTs\|oGs\|oTs\|oTs\|oT] |
| 3708 | [oTs\|oGs\|oGp\|oTp\|oAs\|dAs\|dTs\|5mCs\|dAs\|dAs\|dTs\|dGs\|5mCs\|dAs\|dAs\|5mCp\|dTp\|oTs\|oGs\|oTs\|oTs\|oT] |
| 3709 | [oAs\|LGs\|o5mCs\|o5mCs\|oAs\|oAs\|oTs\|o5mCs\|dTs\|dGs\|dAs\|dGs\|5mCs\|5mCs\|dAs\|dTs\|dGs\|dAs\|oTs\|oG] |
| 3710 | [oAs\|oGs\|L5mCs\|o5mCs\|oAs\|oAs\|oTs\|o5mCs\|dTs\|dGs\|dAs\|dGs\|5mCs\|5mCs\|dAs\|dTs\|dGs\|dAs\|oTs\|oG] |
| 3711 | [oAs\|oGs\|o5mCs\|L5mCs\|oAs\|oAs\|oTs\|o5mCs\|dTs\|dGs\|dAs\|dGs\|5mCs\|5mCs\|dAs\|dTs\|dGs\|dAs\|oTs\|oG] |
| 3712 | [oAs\|oGs\|o5mCs\|o5mCs\|LAs\|oAs\|oTs\|o5mCs\|dTs\|dGs\|dAs\|dGs\|5mCs\|5mCs\|dAs\|dTs\|dGs\|dAs\|oTs\|oG] |
| 3713 | [oAs\|oGs\|o5mCs\|o5mCs\|oAs\|LAs\|oTs\|o5mCs\|dTs\|dGs\|dAs\|dGs\|5mCs\|5mCs\|dAs\|dTs\|dGs\|dAs\|oTs\|oG] |
| 3714 | [oAs\|oGs\|o5mCs\|o5mCs\|oAs\|oAs\|LTs\|o5mCs\|dTs\|dGs\|dAs\|dGs\|5mCs\|5mCs\|dAs\|dTs\|dGs\|dAs\|oTs\|oG] |
| 3715 | [oAs\|oGs\|5mCs\|5mCs\|dAs\|dAs\|dTs\|5mCs\|dTs\|dGs\|dAs\|dGs\|o5mCs\|o5mCs\|oAs\|oTs\|oGs\|oAs\|LTs\|oG] |
| 3716 | [oAs\|oGs\|5mCs\|5mCs\|dAs\|dAs\|dTs\|5mCs\|dTs\|dGs\|dAs\|dGs\|o5mCs\|o5mCs\|oAs\|oTs\|oGs\|LAs\|oTs\|oG] |
| 3717 | [oAs\|oGs\|5mCs\|5mCs\|dAs\|dAs\|dTs\|5mCs\|dTs\|dGs\|dAs\|dGs\|o5mCs\|o5mCs\|oAs\|oTs\|LGs\|oAs\|oTs\|oG] |
| 3718 | [oAs\|oGs\|5mCs\|5mCs\|dAs\|dAs\|dTs\|5mCs\|dTs\|dGs\|dAs\|dGs\|o5mCs\|o5mCs\|oAs\|LTs\|oGs\|oAs\|oTs\|oG] |
| 3719 | [oAs\|oGs\|5mCs\|5mCs\|dAs\|dAs\|dTs\|5mCs\|dTs\|dGs\|dAs\|dGs\|o5mCs\|o5mCs\|LAs\|oTs\|oGs\|oAs\|oTs\|oG] |
| 3720 | [oAs\|oGs\|5mCs\|5mCs\|dAs\|dAs\|dTs\|5mCs\|dTs\|dGs\|dAs\|dGs\|o5mCs\|L5mCs\|oAs\|oTs\|oGs\|oAs\|oTs\|oG] |
| 3721 | [oAs\|LGs\|o5mCs\|o5mCs\|oAs\|oAs\|oTs\|5mCs\|dTs\|dGs\|dAs\|dGs\|5mCs\|5mCs\|dAs\|dTs\|dGs\|oAs\|oTs\|oG] |
| 3722 | [oAs\|oGs\|L5mCs\|o5mCs\|oAs\|oAs\|oTs\|5mCs\|dTs\|dGs\|dAs\|dGs\|5mCs\|5mCs\|dAs\|dTs\|dGs\|oAs\|oTs\|oG] |
| 3723 | [oAs\|oGs\|o5mCs\|L5mCs\|oAs\|oAs\|oTs\|5mCs\|dTs\|dGs\|dAs\|dGs\|5mCs\|5mCs\|dAs\|dTs\|dGs\|oAs\|oTs\|oG] |
| 3724 | [oAs\|oGs\|o5mCs\|o5mCs\|LAs\|oAs\|oTs\|5mCs\|dTs\|dGs\|dAs\|dGs\|5mCs\|5mCs\|dAs\|dTs\|dGs\|oAs\|oTs\|oG] |
| 3725 | [oAs\|oGs\|o5mCs\|o5mCs\|oAs\|LAs\|oTs\|5mCs\|dTs\|dGs\|dAs\|dGs\|5mCs\|5mCs\|dAs\|dTs\|dGs\|oAs\|oTs\|oG] |
| 3726 | [oAs\|oGs\|o5mCs\|5mCs\|dAs\|dAs\|dTs\|5mCs\|dTs\|dGs\|dAs\|dGs\|5mCs\|o5mCs\|oAs\|oTs\|oGs\|oAs\|LTs\|oG] |
| 3727 | [oAs\|oGs\|o5mCs\|5mCs\|dAs\|dAs\|dTs\|5mCs\|dTs\|dGs\|dAs\|dGs\|5mCs\|o5mCs\|oAs\|oTs\|oGs\|LAs\|oTs\|oG] |
| 3728 | [oAs\|oGs\|o5mCs\|5mCs\|dAs\|dAs\|dTs\|5mCs\|dTs\|dGs\|dAs\|dGs\|5mCs\|o5mCs\|oAs\|oTs\|LGs\|oAs\|oTs\|oG] |
| 3729 | [oAs\|oGs\|o5mCs\|5mCs\|dAs\|dAs\|dTs\|5mCs\|dTs\|dGs\|dAs\|dGs\|5mCs\|o5mCs\|oAs\|LTs\|oGs\|oAs\|oTs\|oG] |
| 3730 | [oAs\|oGs\|o5mCs\|5mCs\|dAs\|dAs\|dTs\|5mCs\|dTs\|dGs\|dAs\|dGs\|5mCs\|o5mCs\|LAs\|oTs\|oGs\|oAs\|oTs\|oG] |
| 3731 | [oAs\|LGs\|o5mCs\|o5mCs\|oAs\|oAs\|oTs\|5mCs\|dTs\|dGs\|dAs\|dGs\|5mCs\|5mCs\|dAs\|dTs\|dGs\|oAs\|oT] |
| 3732 | [oAs\|oGs\|L5mCs\|o5mCs\|oAs\|oAs\|oTs\|5mCs\|dTs\|dGs\|dAs\|dGs\|5mCs\|5mCs\|dAs\|dTs\|dGs\|oAs\|oT] |
| 3733 | [oAs\|oGs\|o5mCs\|L5mCs\|oAs\|oAs\|oTs\|5mCs\|dTs\|dGs\|dAs\|dGs\|5mCs\|5mCs\|dAs\|dTs\|dGs\|oAs\|oT] |
| 3734 | [oAs\|oGs\|o5mCs\|o5mCs\|LAs\|oAs\|oTs\|5mCs\|dTs\|dGs\|dAs\|dGs\|5mCs\|5mCs\|dAs\|dTs\|dGs\|oAs\|oT] |
| 3735 | [oAs\|oGs\|o5mCs\|o5mCs\|oAs\|LAs\|oTs\|5mCs\|dTs\|dGs\|dAs\|dGs\|5mCs\|5mCs\|dAs\|dTs\|dGs\|oAs\|oT] |
| 3736 | [oGs\|o5mCs\|5mCs\|dAs\|dAs\|dTs\|5mCs\|dTs\|dGs\|dAs\|dGs\|5mCs\|o5mCs\|oAs\|oTs\|oGs\|oAs\|LTs\|oG] |
| 3737 | [oGs\|o5mCs\|5mCs\|dAs\|dAs\|dTs\|5mCs\|dTs\|dGs\|dAs\|dGs\|5mCs\|o5mCs\|oAs\|oTs\|oGs\|LAs\|oTs\|oG] |
| 3738 | [oGs\|o5mCs\|5mCs\|dAs\|dAs\|dTs\|5mCs\|dTs\|dGs\|dAs\|dGs\|5mCs\|o5mCs\|oAs\|oTs\|LGs\|oAs\|oTs\|oG] |
| 3739 | [oGs\|o5mCs\|5mCs\|dAs\|dAs\|dTs\|5mCs\|dTs\|dGs\|dAs\|dGs\|5mCs\|o5mCs\|oAs\|LTs\|oGs\|oAs\|oTs\|oG] |
| 3740 | [oGs\|o5mCs\|5mCs\|dAs\|dAs\|dTs\|5mCs\|dTs\|dGs\|dAs\|dGs\|5mCs\|o5mCs\|LAs\|oTs\|oGs\|oAs\|oTs\|oG] |
| 3741 | [oAs\|LGs\|o5mCs\|o5mCs\|oAs\|oAs\|dTs\|5mCs\|dTs\|dGs\|dAs\|dGs\|5mCs\|5mCs\|dAs\|dTs\|oGs\|oAs\|oTs\|oG] |
| 3742 | [oAs\|oGs\|L5mCs\|o5mCs\|oAs\|oAs\|dTs\|5mCs\|dTs\|dGs\|dAs\|dGs\|5mCs\|5mCs\|dAs\|dTs\|oGs\|oAs\|oTs\|oG] |
| 3743 | [oAs\|oGs\|o5mCs\|L5mCs\|oAs\|oAs\|dTs\|5mCs\|dTs\|dGs\|dAs\|dGs\|5mCs\|5mCs\|dAs\|dTs\|oGs\|oAs\|oTs\|oG] |
| 3744 | [oAs\|oGs\|o5mCs\|o5mCs\|LAs\|oAs\|dTs\|5mCs\|dTs\|dGs\|dAs\|dGs\|5mCs\|5mCs\|dAs\|dTs\|oGs\|oAs\|oTs\|oG] |
| 3745 | [oAs\|oGs\|o5mCs\|o5mCs\|dAs\|dAs\|dTs\|5mCs\|dTs\|dGs\|dAs\|dGs\|5mCs\|5mCs\|oAs\|oTs\|oGs\|oAs\|LTs\|oG] |
| 3746 | [oAs\|oGs\|o5mCs\|o5mCs\|dAs\|dAs\|dTs\|5mCs\|dTs\|dGs\|dAs\|dGs\|5mCs\|5mCs\|oAs\|oTs\|oGs\|LAs\|oTs\|oG] |
| 3747 | [oAs\|oGs\|o5mCs\|o5mCs\|dAs\|dAs\|dTs\|5mCs\|dTs\|dGs\|dAs\|dGs\|5mCs\|5mCs\|oAs\|oTs\|LGs\|oAs\|oTs\|oG] |
| 3748 | [oAs\|oGs\|o5mCs\|o5mCs\|dAs\|dAs\|dTs\|5mCs\|dTs\|dGs\|dAs\|dGs\|5mCs\|5mCs\|oAs\|LTs\|oGs\|oAs\|oTs\|oG] |
| 3749 | [oAs\|LGs\|o5mCs\|o5mCs\|oAs\|oAs\|dTs\|5mCs\|dTs\|dGs\|dAs\|dGs\|5mCs\|5mCs\|dAs\|dTs\|oGs\|oAs\|oT] |
| 3750 | [oAs\|oGs\|L5mCs\|o5mCs\|oAs\|oAs\|dTs\|5mCs\|dTs\|dGs\|dAs\|dGs\|5mCs\|5mCs\|dAs\|dTs\|oGs\|oAs\|oT] |
| 3751 | [oAs\|oGs\|o5mCs\|L5mCs\|oAs\|oAs\|dTs\|5mCs\|dTs\|dGs\|dAs\|dGs\|5mCs\|5mCs\|dAs\|dTs\|oGs\|oAs\|oT] |
| 3752 | [oAs\|oGs\|o5mCs\|o5mCs\|LAs\|oAs\|dTs\|5mCs\|dTs\|dGs\|dAs\|dGs\|5mCs\|5mCs\|dAs\|dTs\|oGs\|oAs\|oT] |
| 3753 | [oAs\|oGs\|o5mCs\|5mCs\|dAs\|dAs\|dTs\|5mCs\|dTs\|dGs\|dAs\|dGs\|5mCs\|5mCs\|oAs\|oTs\|oGs\|oAs\|LTs\|oG] |
| 3754 | [oAs\|oGs\|o5mCs\|5mCs\|dAs\|dAs\|dTs\|5mCs\|dTs\|dGs\|dAs\|dGs\|5mCs\|5mCs\|oAs\|oTs\|oGs\|LAs\|oTs\|oG] |
| 3755 | [oAs\|oGs\|o5mCs\|5mCs\|dAs\|dAs\|dTs\|5mCs\|dTs\|dGs\|dAs\|dGs\|5mCs\|5mCs\|oAs\|oTs\|LGs\|oAs\|oTs\|oG] |
| 3756 | [oAs\|LGs\|o5mCs\|o5mCs\|oAs\|oAs\|dTs\|5mCs\|dTs\|dGs\|dAs\|dGs\|5mCs\|5mCs\|dAs\|dTs\|oGs\|oA] |
| 3757 | [oAs\|oGs\|L5mCs\|o5mCs\|oAs\|oAs\|dTs\|5mCs\|dTs\|dGs\|dAs\|dGs\|5mCs\|5mCs\|dAs\|dTs\|oGs\|oA] |
| 3758 | [oAs\|oGs\|o5mCs\|L5mCs\|oAs\|oAs\|dTs\|5mCs\|dTs\|dGs\|dAs\|dGs\|5mCs\|5mCs\|dAs\|dTs\|oGs\|oA] |
| 3759 | [oAs\|oGs\|o5mCs\|o5mCs\|LAs\|oAs\|dTs\|5mCs\|dTs\|dGs\|dAs\|dGs\|5mCs\|5mCs\|dAs\|dTs\|oGs\|oA] |
| 3760 | [o5mCs\|o5mCs\|dAs\|dAs\|dTs\|5mCs\|dTs\|dGs\|dAs\|dGs\|5mCs\|5mCs\|oAs\|oTs\|oGs\|oAs\|LTs\|oG] |
| 3761 | [o5mCs\|o5mCs\|dAs\|dAs\|dTs\|5mCs\|dTs\|dGs\|dAs\|dGs\|5mCs\|5mCs\|oAs\|oTs\|oGs\|LAs\|oTs\|oG] |
| 3762 | [o5mCs\|o5mCs\|dAs\|dAs\|dTs\|5mCs\|dTs\|dGs\|dAs\|dGs\|5mCs\|5mCs\|oAs\|oTs\|LGs\|oAs\|oTs\|oG] |
| 3763 | [o5mCs\|o5mCs\|dAs\|dAs\|dTs\|5mCs\|dTs\|dGs\|dAs\|dGs\|5mCs\|5mCs\|oAs\|LTs\|oGs\|oAs\|oTs\|oG] |
| 3764 | [oAs\|LGs\|o5mCs\|o5mCs\|oAs\|dAs\|dTs\|5mCs\|dTs\|dGs\|dAs\|dGs\|5mCs\|5mCs\|dAs\|oTs\|oGs\|oAs\|oTs\|oG] |
| 3765 | [oAs\|oGs\|L5mCs\|o5mCs\|oAs\|dAs\|dTs\|5mCs\|dTs\|dGs\|dAs\|dGs\|5mCs\|5mCs\|dAs\|oTs\|oGs\|oAs\|oTs\|oG] |
| 3766 | [oAs\|oGs\|o5mCs\|L5mCs\|oAs\|dAs\|dTs\|5mCs\|dTs\|dGs\|dAs\|dGs\|5mCs\|5mCs\|dAs\|oTs\|oGs\|oAs\|oTs\|oG] |
| 3767 | [oAs\|oGs\|o5mCs\|o5mCs\|oAs\|dAs\|dTs\|5mCs\|dTs\|dGs\|dAs\|dGs\|5mCs\|5mCs\|dAs\|oTs\|oGs\|oAs\|LTs\|oG] |
| 3768 | [oAs\|oGs\|o5mCs\|o5mCs\|oAs\|dAs\|dTs\|5mCs\|dTs\|dGs\|dAs\|dGs\|5mCs\|5mCs\|dAs\|oTs\|oGs\|LAs\|oTs\|oG] |
| 3769 | [oAs\|oGs\|o5mCs\|o5mCs\|oAs\|dAs\|dTs\|5mCs\|dTs\|dGs\|dAs\|dGs\|5mCs\|5mCs\|dAs\|oTs\|LGs\|oAs\|oTs\|oG] |
| 3770 | [oAs\|LGs\|o5mCs\|o5mCs\|oAs\|dAs\|dTs\|5mCs\|dTs\|dGs\|dAs\|dGs\|5mCs\|5mCs\|dAs\|oTs\|oGs\|oAs\|oT] |
| 3771 | [oAs\|oGs\|L5mCs\|o5mCs\|oAs\|dAs\|dTs\|5mCs\|dTs\|dGs\|dAs\|dGs\|5mCs\|5mCs\|dAs\|oTs\|oGs\|oAs\|oT] |
| 3772 | [oAs\|oGs\|o5mCs\|L5mCs\|oAs\|dAs\|dTs\|5mCs\|dTs\|dGs\|dAs\|dGs\|5mCs\|5mCs\|dAs\|oTs\|oGs\|oAs\|oT] |
| 3773 | [oGs\|o5mCs\|o5mCs\|oAs\|dAs\|dTs\|5mCs\|dTs\|dGs\|dAs\|dGs\|5mCs\|5mCs\|dAs\|oTs\|oGs\|oAs\|LTs\|oG] |
| 3774 | [oGs\|o5mCs\|o5mCs\|oAs\|dAs\|dTs\|5mCs\|dTs\|dGs\|dAs\|dGs\|5mCs\|5mCs\|dAs\|oTs\|oGs\|LAs\|oTs\|oG] |
| 3775 | [oGs\|o5mCs\|o5mCs\|oAs\|dAs\|dTs\|5mCs\|dTs\|dGs\|dAs\|dGs\|5mCs\|5mCs\|dAs\|oTs\|LGs\|oAs\|oTs\|oG] |
| 3776 | [oAs\|LGs\|o5mCs\|o5mCs\|oAs\|dAs\|dTs\|5mCs\|dTs\|dGs\|dAs\|dGs\|5mCs\|5mCs\|dAs\|oTs\|oGs\|oA] |
| 3777 | [oAs\|oGs\|L5mCs\|o5mCs\|oAs\|dAs\|dTs\|5mCs\|dTs\|dGs\|dAs\|dGs\|5mCs\|5mCs\|dAs\|oTs\|oGs\|oA] |
| 3778 | [oAs\|oGs\|o5mCs\|L5mCs\|oAs\|dAs\|dTs\|5mCs\|dTs\|dGs\|dAs\|dGs\|5mCs\|5mCs\|dAs\|oTs\|oGs\|oA] |
| 3779 | [o5mCs\|o5mCs\|oAs\|dAs\|dTs\|5mCs\|dTs\|dGs\|dAs\|dGs\|5mCs\|5mCs\|dAs\|oTs\|oGs\|oAs\|LTs\|oG] |
| 3780 | [o5mCs\|o5mCs\|oAs\|dAs\|dTs\|5mCs\|dTs\|dGs\|dAs\|dGs\|5mCs\|5mCs\|dAs\|oTs\|oGs\|LAs\|oTs\|oG] |
| 3781 | [o5mCs\|o5mCs\|oAs\|dAs\|dTs\|5mCs\|dTs\|dGs\|dAs\|dGs\|5mCs\|5mCs\|dAs\|oTs\|LGs\|oAs\|oTs\|oG] |
| 3782 | [oAs\|LGs\|o5mCs\|o5mCs\|oAs\|dAs\|dTs\|5mCs\|dTs\|dGs\|dAs\|dGs\|5mCs\|5mCs\|dAs\|oTs\|oG] |
| 3783 | [oAs\|oGs\|L5mCs\|o5mCs\|oAs\|dAs\|dTs\|5mCs\|dTs\|dGs\|dAs\|dGs\|5mCs\|5mCs\|dAs\|oTs\|oG] |
| 3784 | [oAs\|oGs\|o5mCs\|L5mCs\|oAs\|dAs\|dTs\|5mCs\|dTs\|dGs\|dAs\|dGs\|5mCs\|5mCs\|dAs\|oTs\|oG] |
| 3785 | [o5mCs\|oAs\|dAs\|dTs\|5mCs\|dTs\|dGs\|dAs\|dGs\|5mCs\|5mCs\|dAs\|oTs\|oGs\|oAs\|LTs\|oG] |
| 3786 | [o5mCs\|oAs\|dAs\|dTs\|5mCs\|dTs\|dGs\|dAs\|dGs\|5mCs\|5mCs\|dAs\|oTs\|oGs\|LAs\|oTs\|oG] |
| 3787 | [o5mCs\|oAs\|dAs\|dTs\|5mCs\|dTs\|dGs\|dAs\|dGs\|5mCs\|5mCs\|dAs\|oTs\|LGs\|oAs\|oTs\|oG] |
| 3788 | [oGs\|L5mCs\|o5mCs\|oAs\|dAs\|dTs\|5mCs\|dTs\|dGs\|dAs\|dGs\|5mCs\|5mCs\|dAs\|oTs\|oGs\|oAs\|oTs\|oG] |
| 3789 | [oGs\|o5mCs\|L5mCs\|oAs\|dAs\|dTs\|5mCs\|dTs\|dGs\|dAs\|dGs\|5mCs\|5mCs\|dAs\|oTs\|oGs\|oAs\|oTs\|oG] |
| 3790 | [oAs\|oGs\|o5mCs\|o5mCs\|oAs\|dAs\|dTs\|5mCs\|dTs\|dGs\|dAs\|dGs\|5mCs\|5mCs\|dAs\|oTs\|oGs\|LAs\|oT] |
| 3791 | [oAs\|oGs\|o5mCs\|o5mCs\|oAs\|dAs\|dTs\|5mCs\|dTs\|dGs\|dAs\|dGs\|5mCs\|5mCs\|dAs\|oTs\|LGs\|oAs\|oT] |
| 3792 | [oGs\|L5mCs\|o5mCs\|oAs\|dAs\|dTs\|5mCs\|dTs\|dGs\|dAs\|dGs\|5mCs\|5mCs\|dAs\|oTs\|oGs\|oAs\|oT] |
| 3793 | [oGs\|o5mCs\|L5mCs\|oAs\|dAs\|dTs\|5mCs\|dTs\|dGs\|dAs\|dGs\|5mCs\|5mCs\|dAs\|oTs\|oGs\|oAs\|oT] |
| 3794 | [oGs\|o5mCs\|o5mCs\|oAs\|dAs\|dTs\|5mCs\|dTs\|dGs\|dAs\|dGs\|5mCs\|5mCs\|dAs\|oTs\|oGs\|LAs\|oT] |
| 3795 | [oGs\|o5mCs\|o5mCs\|oAs\|dAs\|dTs\|5mCs\|dTs\|dGs\|dAs\|dGs\|5mCs\|5mCs\|dAs\|oTs\|LGs\|oAs\|oT] |
| 3796 | [oGs\|L5mCs\|o5mCs\|oAs\|dAs\|dTs\|5mCs\|dTs\|dGs\|dAs\|dGs\|5mCs\|5mCs\|dAs\|oTs\|oGs\|oA] |
| 3797 | [oGs\|o5mCs\|L5mCs\|oAs\|dAs\|dTs\|5mCs\|dTs\|dGs\|dAs\|dGs\|5mCs\|5mCs\|dAs\|oTs\|oGs\|oA] |
| 3798 | [oGs\|o5mCs\|o5mCs\|oAs\|dAs\|dTs\|5mCs\|dTs\|dGs\|dAs\|dGs\|5mCs\|5mCs\|dAs\|oTsILGs\|oA] |
| 3799 | [oAs\|oGs\|o5mCs\|o5mCs\|oAs\|oAs\|oTs\|o5mCs\|dTs\|dGs\|dAs\|dGs\|5mCs\|5mCs\|dAs\|dTs\|dGs\|dAs\|oTs\|oG] |
| 3800 | [oAs\|oGs\|5mCs\|5mCs\|dAs\|dAs\|dTs\|5mCs\|dTs\|dGs\|dAs\|dGs\|o5mCs\|o5mCs\|oAs\|oTs\|oGs\|oAs\|oTs\|oG] |
| 3801 | [oAs\|oGs\|o5mCs\|o5mCs\|oAs\|oAs\|oTs\|5mCs\|dTs\|dGs\|dAs\|dGs\|5mCs\|5mCs\|dAs\|dTs\|dGs\|oAs\|oTs\|oG] |
| 3802 | [oAs\|oGs\|o5mCs\|5mCs\|dAs\|dAs\|dTs\|5mCs\|dTs\|dGs\|dAs\|dGs\|5mCs\|o5mCs\|oAs\|oTs\|oGs\|oAs\|oTs\|oG] |
| 3803 | [oAs\|oGs\|o5mCs\|o5mCs\|oAs\|oAs\|oTs\|5mCs\|dTs\|dGs\|dAs\|dGs\|5mCs\|5mCs\|dAs\|dTs\|dGs\|oAs\|oT] |
| 3804 | [oGs\|o5mCs\|5mCs\|dAs\|dAs\|dTs\|5mCs\|dTs\|dGs\|dAs\|dGs\|5mCs\|o5mCs\|oAs\|oTs\|oGs\|oAs\|oTs\|oG] |
| 3805 | [oAs\|oGs\|o5mCs\|o5mCs\|oAs\|oAs\|dTs\|5mCs\|dTs\|dGs\|dAs\|dGs\|5mCs\|5mCs\|dAs\|dTs\|oGs\|oAs\|oTs\|oG] |
| 3806 | [oAs\|oGs\|o5mCs\|o5mCs\|dAs\|dAs\|dTs\|5mCs\|dTs\|dGs\|dAs\|dGs\|5mCs\|5mCs\|oAs\|oTs\|oGs\|oAs\|oTs\|oG] |
| 3807 | [oAs\|oGs\|o5mCs\|o5mCs\|oAs\|oAs\|dTs\|5mCs\|dTs\|dGs\|dAs\|dGs\|5mCs\|5mCs\|dAs\|dTs\|oGs\|oAs\|oT] |
| 3808 | [oAs\|oGs\|o5mCs\|5mCs\|dAs\|dAs\|dTs\|5mCs\|dTs\|dGs\|dAs\|dGs\|5mCs\|5mCs\|oAs\|oTs\|oGs\|oAs\|oTs\|oG] |
| 3809 | [oAs\|oGs\|o5mCs\|o5mCs\|oAs\|oAs\|dTs\|5mCs\|dTs\|dGs\|dAs\|dGs\|5mCs\|5mCs\|dAs\|dTs\|oGs\|oA] |
| 3810 | [o5mCs\|o5mCs\|dAs\|dAs\|dTs\|5mCs\|dTs\|dGs\|dAs\|dGs\|5mCs\|5mCs\|oAs\|oTs\|oGs\|oAs\|oTs\|oG] |
| 3811 | [oAs\|oGs\|o5mCs\|o5mCs\|oAs\|dAs\|dTs\|5mCs\|dTs\|dGs\|dAs\|dGs\|5mCs\|5mCs\|dAs\|oTs\|oGs\|oAs\|oTs\|oG] |
| 3812 | [oAs\|oGs\|o5mCs\|o5mCs\|oAs\|dAs\|dTs\|5mCs\|dTs\|dGs\|dAs\|dGs\|5mCs\|5mCs\|dAs\|oTs\|oGs\|oAs\|oT] |
| 3813 | [oAs\|oGs\|o5mCs\|o5mCs\|oAs\|dAs\|dTs\|5mCs\|dTs\|dGs\|dAs\|dGs\|5mCs\|5mCs\|dAs\|oTs\|oGs\|oA] |
| 3814 | [o5mCs\|o5mCs\|oAs\|dAs\|dTs\|5mCs\|dTs\|dGs\|dAs\|dGs\|5mCs\|5mCs\|dAs\|oTs\|oGs\|oAs\|oTs\|oG] |
| 3815 | [oAs\|oGs\|o5mCs\|o5mCs\|oAs\|dAs\|dTs\|5mCs\|dTs\|dGs\|dAs\|dGs\|5mCs\|5mCs\|dAs\|oTs\|oG] |
| 3816 | [o5mCs\|oAs\|dAs\|dTs\|5mCs\|dTs\|dGs\|dAs\|dGs\|5mCs\|5mCs\|dAs\|oTs\|oGs\|oAs\|oTs\|oG] |
| 3817 | [oGs\|o5mCs\|o5mCs\|oAs\|dAs\|dTs\|5mCs\|dTs\|dGs\|dAs\|dGs\|5mCs\|5mCs\|dAs\|oTs\|oGs\|oAs\|oTs\|oG] |
| 3818 | [oGs\|o5mCs\|o5mCs\|oAs\|dAs\|dTs\|5mCs\|dTs\|dGs\|dAs\|dGs\|5mCs\|5mCs\|dAs\|oTs\|oGs\|oAs\|oT] |
| 3819 | [oGs\|o5mCs\|o5mCs\|oAs\|dAs\|dTs\|5mCs\|dTs\|dGs\|dAs\|dGs\|5mCs\|5mCs\|dAs\|oTs\|oGs\|oA] |
| 3820 | [oAs\|oGs\|o5mCp\|o5mCs\|oAs\|dAs\|dTs\|5mCs\|dTs\|dGs\|dAs\|dGs\|5mCs\|5mCs\|dAs\|oTs\|oGs\|oAs\|oTs\|oG] |
| 3821 | [oAs\|oGs\|o5mCs\|o5mCp\|oAs\|dAs\|dTs\|5mCs\|dTs\|dGs\|dAs\|dGs\|5mCs\|5mCs\|dAs\|oTs\|oGs\|oAs\|oTs\|oG] |
| 3822 | [oAs\|oGs\|o5mCp\|o5mCp\|oAs\|dAs\|dTs\|5mCs\|dTs\|dGs\|dAs\|dGs\|5mCs\|5mCs\|dAs\|oTs\|oGs\|oAs\|oTs\|oG] |
| 3823 | [oAs\|oGs\|o5mCs\|o5mCs\|oAs\|dAs\|dTs\|5mCs\|dTs\|dGs\|dAs\|dGs\|5mCs\|5mCs\|dAs\|oTs\|oGploAs\|oTs\|oG] |
| 3824 | [oAs\|oGs\|o5mCs\|o5mCs\|oAs\|dAs\|dTs\|5mCs\|dTs\|dGs\|dAs\|dGs\|5mCs\|5mCs\|dAs\|oTp\|oGs\|oAs\|oTs\|oG] |
| 3825 | [oAs\|oGs\|o5mCs\|o5mCs\|oAs\|dAs\|dTs\|5mCs\|dTs\|dGs\|dAs\|dGs\|5mCs\|5mCs\|dAs\|oTp\|oGp\|oAs\|oTs\|oG] |
| 3826 | [oAs\|oGs\|o5mCp\|o5mCs\|oAs\|dAs\|dTs\|5mCs\|dTs\|dGs\|dAs\|dGs\|5mCs\|5mCs\|dAs\|oTs\|oGp\|oAs\|oTs\|oG] |
| 3827 | [oAs\|oGs\|o5mCp\|o5mCs\|oAs\|dAs\|dTs\|5mCs\|dTs\|dGs\|dAs\|dGs\|5mCs\|5mCs\|dAs\|oTp\|oGs\|oAs\|oTs\|oG] |
| 3828 | [oAs\|oGs\|o5mCs\|o5mCp\|oAs\|dAs\|dTs\|5mCs\|dTs\|dGs\|dAs\|dGs\|5mCs\|5mCs\|dAs\|oTs\|oGp\|oAs\|oTs\|oG] |
| 3829 | [oAs\|oGs\|o5mCs\|o5mCp\|oAs\|dAs\|dTs\|5mCs\|dTs\|dGs\|dAs\|dGs\|5mCs\|5mCs\|dAs\|oTp\|oGs\|oAs\|oTs\|oG] |
| 3830 | [oAs\|oGs\|o5mCp\|o5mCs\|oAs\|dAs\|dTs\|5mCs\|dTs\|dGs\|dAs\|dGs\|5mCs\|5mCs\|dAs\|oTp\|oGp\|oAs\|oTs\|oG] |
| 3831 | [oAs\|oGs\|o5mCs\|o5mCp\|oAs\|dAs\|dTs\|5mCs\|dTs\|dGs\|dAs\|dGs\|5mCs\|5mCs\|dAs\|oTp\|oGp\|oAs\|oTs\|oG] |
| 3832 | [oAs\|oGs\|o5mCp\|o5mCp\|oAs\|dAs\|dTs\|5mCs\|dTs\|dGs\|dAs\|dGs\|5mCs\|5mCs\|dAs\|oTs\|oGp\|oAs\|oTs\|oG] |
| 3833 | [oAs\|oGs\|o5mCp\|o5mCp\|oAs\|dAs\|dTs\|5mCs\|dTs\|dGs\|dAs\|dGs\|5mCs\|5mCs\|dAs\|oTp\|oGs\|oAs\|oTs\|oG] |
| 3834 | [oAs\|oGs\|o5mCp\|o5mCp\|oAs\|dAs\|dTs\|5mCs\|dTs\|dGs\|dAs\|dGs\|5mCs\|5mCs\|dAs\|oTp\|oGp\|oAs\|oTs\|oG] |
| 3835 | [oAs\|oGs\|o5mCs\|o5mCs\|oAs\|dAs\|dTs\|5mCs\|dTs\|dGs\|dAs\|dGs\|5mCs\|5mCs\|dAs\|oTs\|oGs\|oAs\|oTs\|oGs\|oG] |
| 3836 | [oAs\|oGs\|o5mCp\|o5mCs\|oAs\|dAs\|dTs\|5mCs\|dTs\|dGs\|dAs\|dGs\|5mCs\|5mCs\|dAs\|oTs\|oGs\|oAs\|oTs\|oGs\|oG] |
| 3837 | [oAs\|oGs\|o5mCs\|o5mCp\|oAs\|dAs\|dTs\|5mCs\|dTs\|dGs\|dAs\|dGs\|5mCs\|5mCs\|dAs\|oTs\|oGs\|oAs\|oTs\|oGs\|oG] |
| 3838 | [oAs\|oGs\|o5mCp\|o5mCp\|oAs\|dAs\|dTs\|5mCs\|dTs\|dGs\|dAs\|dGs\|5mCs\|5mCs\|dAs\|oTs\|oGs\|oAs\|oTs\|oGs\|oG] |
| 3839 | [oAs\|oGs\|o5mCs\|o5mCs\|oAs\|dAs\|dTs\|5mCs\|dTs\|dGs\|dAs\|dGs\|5mCs\|5mCs\|dAs\|oTs\|oGp\|oAs\|oTs\|oGs\|oG] |
| 3840 | [oAs\|oGs\|o5mCs\|o5mCs\|oAs\|dAs\|dTs\|5mCs\|dTs\|dGs\|dAs\|dGs\|5mCs\|5mCs\|dAs\|oTp\|oGs\|oAs\|oTs\|oGs\|oG] |
| 3841 | [oAs\|oGs\|o5mCs\|o5mCs\|oAs\|dAs\|dTs\|5mCs\|dTs\|dGs\|dAs\|dGs\|5mCs\|5mCs\|dAs\|oTp\|oGp\|oAs\|oTs\|oGs\|oG] |
| 3842 | [oAs\|oGs\|o5mCp\|o5mCs\|oAs\|dAs\|dTs\|5mCs\|dTs\|dGs\|dAs\|dGs\|5mCs\|5mCs\|dAs\|oTs\|oGp\|oAs\|oTs\|oGs\|oG] |
| 3843 | [oAs\|oGs\|o5mCp\|o5mCs\|oAs\|dAs\|dTs\|5mCs\|dTs\|dGs\|dAs\|dGs\|5mCs\|5mCs\|dAs\|oTp\|oGs\|oAs\|oTs\|oGs\|oG] |
| 3844 | [oAs\|oGs\|o5mCs\|o5mCp\|oAs\|dAs\|dTs\|5mCs\|dTs\|dGs\|dAs\|dGs\|5mCs\|5mCs\|dAs\|oTs\|oGp\|oAs\|oTs\|oGs\|oG] |
| 3845 | [oAs\|oGs\|o5mCs\|o5mCp\|oAs\|dAs\|dTs\|5mCs\|dTs\|dGs\|dAs\|dGs\|5mCs\|5mCs\|dAs\|oTp\|oGs\|oAs\|oTs\|oGs\|oG] |
| 3846 | [oAs\|oGs\|o5mCp\|o5mCs\|oAs\|dAs\|dTs\|5mCs\|dTs\|dGs\|dAs\|dGs\|5mCs\|5mCs\|dAs\|oTp\|oGp\|oAs\|oTs\|oGs\|oG] |
| 3847 | [oAs\|oGs\|o5mCs\|o5mCp\|oAs\|dAs\|dTs\|5mCs\|dTs\|dGs\|dAs\|dGs\|5mCs\|5mCs\|dAs\|oTp\|oGp\|oAs\|oTs\|oGs\|oG] |
| 3848 | [oAs\|oGs\|o5mCp\|o5mCp\|oAs\|dAs\|dTs\|5mCs\|dTs\|dGs\|dAs\|dGs\|5mCs\|5mCs\|dAs\|oTs\|oGp\|oAs\|oTs\|oGs\|oG] |
| 3849 | [oAs\|oGs\|o5mCp\|o5mCp\|oAs\|dAs\|dTs\|5mCs\|dTs\|dGs\|dAs\|dGs\|5mCs\|5mCs\|dAs\|oTp\|oGs\|oAs\|oTs\|oGs\|oG] |
| 3850 | [oAs\|oGs\|o5mCp\|o5mCp\|oAs\|dAs\|dTs\|5mCs\|dTs\|dGs\|dAs\|dGs\|5mCs\|5mCs\|dAs\|oTp\|oGp\|oAs\|oTs\|oGs\|oG] |
| 3851 | [oAs\|oGs\|o5mCs\|o5mCs\|oAs\|dAs\|dTs\|5mCs\|dTs\|dGs\|dAs\|dGs\|5mCs\|5mCs\|dAs\|oTs\|oGs\|oAs\|oTs\|oGs\|oGs\|oT] |
| 3852 | [oAs\|oGs\|o5mCp\|o5mCs\|oAs\|dAs\|dTs\|5mCs\|dTs\|dGs\|dAs\|dGs\|5mCs\|5mCs\|dAs\|oTs\|oGs\|oAs\|oTs\|oGs\|oGs\|oT] |
| 3853 | [oAs\|oGs\|o5mCs\|o5mCp\|oAs\|dAs\|dTs\|5mCs\|dTs\|dGs\|dAs\|dGs\|5mCs\|5mCs\|dAs\|oTs\|oGs\|oAs\|oTs\|oGs\|oGs\|oT] |
| 3854 | [oAs\|oGs\|o5mCp\|o5mCp\|oAs\|dAs\|dTs\|5mCs\|dTs\|dGs\|dAs\|dGs\|5mCs\|5mCs\|dAs\|oTs\|oGs\|oAs\|oTs\|oGs\|oGs\|oT] |
| 3855 | [oAs\|oGs\|o5mCs\|o5mCs\|oAs\|dAs\|dTs\|5mCs\|dTs\|dGs\|dAs\|dGs\|5mCs\|5mCs\|dAs\|oTs\|oGp\|oAs\|oTs\|oGs\|oGs\|oT] |
| 3856 | [oAs\|oGs\|o5mCs\|o5mCs\|oAs\|dAs\|dTs\|5mCs\|dTs\|dGs\|dAs\|dGs\|5mCs\|5mCs\|dAs\|oTp\|oGs\|oAs\|oTs\|oGs\|oGs\|oT] |
| 3857 | [oAs\|oGs\|o5mCs\|o5mCs\|oAs\|dAs\|dTs\|5mCs\|dTs\|dGs\|dAs\|dGs\|5mCs\|5mCs\|dAs\|oTp\|oGp\|oAs\|oTs\|oGs\|oGs\|oT] |
| 3858 | [oAs\|oGs\|o5mCp\|o5mCs\|oAs\|dAs\|dTs\|5mCs\|dTs\|dGs\|dAs\|dGs\|5mCs\|5mCs\|dAs\|oTs\|oGp\|oAs\|oTs\|oGs\|oGs\|oT] |
| 3859 | [oAs\|oGs\|o5mCp\|o5mCs\|oAs\|dAs\|dTs\|5mCs\|dTs\|dGs\|dAs\|dGs\|5mCs\|5mCs\|dAs\|oTp\|oGs\|oAs\|oTs\|oGs\|oGs\|oT] |
| 3860 | [oAs\|oGs\|o5mCs\|o5mCp\|oAs\|dAs\|dTs\|5mCs\|dTs\|dGs\|dAs\|dGs\|5mCs\|5mCs\|dAs\|oTs\|oGp\|oAs\|oTs\|oGs\|oGs\|oT] |
| 3861 | [oAs\|oGs\|o5mCs\|o5mCp\|oAs\|dAs\|dTs\|5mCs\|dTs\|dGs\|dAs\|dGs\|5mCs\|5mCs\|dAs\|oTp\|oGs\|oAs\|oTs\|oGs\|oGs\|oT] |
| 3862 | [oAs\|oGs\|o5mCp\|o5mCs\|oAs\|dAs\|dTs\|5mCs\|dTs\|dGs\|dAs\|dGs\|5mCs\|5mCs\|dAs\|oTp\|oGp\|oAs\|oTs\|oGs\|oGs\|oT] |
| 3863 | [oAs\|oGs\|o5mCs\|o5mCp\|oAs\|dAs\|dTs\|5mCs\|dTs\|dGs\|dAs\|dGs\|5mCs\|5mCs\|dAs\|oTp\|oGp\|oAs\|oTs\|oGs\|oGs\|oT] |
| 3864 | [oAs\|oGs\|o5mCp\|o5mCp\|oAs\|dAs\|dTs\|5mCs\|dTs\|dGs\|dAs\|dGs\|5mCs\|5mCs\|dAs\|oTs\|oGp\|oAs\|oTs\|oGs\|oGs\|oT] |
| 3865 | [oAs\|oGs\|o5mCp\|o5mCp\|oAs\|dAs\|dTs\|5mCs\|dTs\|dGs\|dAs\|dGs\|5mCs\|5mCs\|dAs\|oTp\|oGs\|oAs\|oTs\|oGs\|oGs\|oT] |
| 3866 | [oAs\|oGs\|o5mCp\|o5mCp\|oAs\|dAs\|dTs\|5mCs\|dTs\|dGs\|dAs\|dGs\|5mCs\|5mCs\|dAs\|oTp\|oGp\|oAs\|oTs\|oGs\|oGs\|oT] |
| 3867 | [oAs\|oGs\|o5mCs\|o5mCs\|oAs\|dAs\|dTs\|5mCs\|dTs\|dGs\|dAs\|dGs\|5mCs\|5mCs\|dAs\|oTs\|oGs\|oAs\|oTs\|oGs\|oGs\|oTs\|oA] |
| 3868 | [oAs\|oGs\|o5mCp\|o5mCs\|oAs\|dAs\|dTs\|5mCs\|dTs\|dGs\|dAs\|dGs\|5mCs\|5mCs\|dAs\|oTs\|oGs\|oAs\|oTs\|oGs\|oGs\|oTs\|oA] |
| 3869 | [oAs\|oGs\|o5mCs\|o5mCp\|oAs\|dAs\|dTs\|5mCs\|dTs\|dGs\|dAs\|dGs\|5mCs\|5mCs\|dAs\|oTs\|oGs\|oAs\|oTs\|oGs\|oGs\|oTs\|oA] |
| 3870 | [oAs\|oGs\|o5mCp\|o5mCp\|oAs\|dAs\|dTs\|5mCs\|dTs\|dGs\|dAs\|dGs\|5mCs\|5mCs\|dAs\|oTs\|oGs\|oAs\|oTs\|oGs\|oGs\|oTs\|oA] |
| 3871 | [oAs\|oGs\|o5mCs\|o5mCs\|oAs\|dAs\|dTs\|5mCs\|dTs\|dGs\|dAs\|dGs\|5mCs\|5mCs\|dAs\|oTs\|oGp\|oAs\|oTs\|oGs\|oGs\|oTs\|oA] |
| 3872 | [oAs\|oGs\|o5mCs\|o5mCs\|oAs\|dAs\|dTs\|5mCs\|dTs\|dGs\|dAs\|dGs\|5mCs\|5mCs\|dAs\|oTp\|oGs\|oAs\|oTs\|oGs\|oGs\|oTs\|oA] |
| 3873 | [oAs\|oGs\|o5mCs\|o5mCs\|oAs\|dAs\|dTs\|5mCs\|dTs\|dGs\|dAs\|dGs\|5mCs\|5mCs\|dAs\|oTp\|oGp\|oAs\|oTs\|oGs\|oGs\|oTs\|oA] |
| 3874 | [oAs\|oGs\|o5mCp\|o5mCs\|oAs\|dAs\|dTs\|5mCs\|dTs\|dGs\|dAs\|dGs\|5mCs\|5mCs\|dAs\|oTs\|oGp\|oAs\|oTs\|oGs\|oGs\|oTs\|oA] |
| 3875 | [oAs\|oGs\|o5mCp\|o5mCs\|oAs\|dAs\|dTs\|5mCs\|dTs\|dGs\|dAs\|dGs\|5mCs\|5mCs\|dAs\|oTp\|oGs\|oAs\|oTs\|oGs\|oGs\|oTs\|oA] |
| 3876 | [oAs\|oGs\|o5mCs\|o5mCp\|oAs\|dAs\|dTs\|5mCs\|dTs\|dGs\|dAs\|dGs\|5mCs\|5mCs\|dAs\|oTs\|oGp\|oAs\|oTs\|oGs\|oGs\|oTs\|oA] |
| 3877 | [oAs\|oGs\|o5mCs\|o5mCp\|oAs\|dAs\|dTs\|5mCs\|dTs\|dGs\|dAs\|dGs\|5mCs\|5mCs\|dAs\|oTp\|oGs\|oAs\|oTs\|oGs\|oGs\|oTs\|oA] |
| 3878 | [oAs\|oGs\|o5mCp\|o5mCs\|oAs\|dAs\|dTs\|5mCs\|dTs\|dGs\|dAs\|dGs\|5mCs\|5mCs\|dAs\|oTp\|oGp\|oAs\|oTs\|oGs\|oGs\|oTs\|oA] |
| 3879 | [oAs\|oGs\|o5mCs\|o5mCp\|oAs\|dAs\|dTs\|5mCs\|dTs\|dGs\|dAs\|dGs\|5mCs\|5mCs\|dAs\|oTp\|oGp\|oAs\|oTs\|oGs\|oGs\|oTs\|oA] |
| 3880 | [oAs\|oGs\|o5mCp\|o5mCp\|oAs\|dAs\|dTs\|5mCs\|dTs\|dGs\|dAs\|dGs\|5mCs\|5mCs\|dAs\|oTs\|oGp\|oAs\|oTs\|oGs\|oGs\|oTs\|oA] |
| 3881 | [oAs\|oGs\|o5mCp\|o5mCp\|oAs\|dAs\|dTs\|5mCs\|dTs\|dGs\|dAs\|dGs\|5mCs\|5mCs\|dAs\|oTp\|oGs\|oAs\|oTs\|oGs\|oGs\|oTs\|oA] |
| 3882 | [oAs\|oGs\|o5mCp\|o5mCp\|oAs\|dAs\|dTs\|5mCs\|dTs\|dGs\|dAs\|dGs\|5mCs\|5mCs\|dAs\|oTp\|oGp\|oAs\|oTs\|oGs\|oGs\|oTs\|oA] |
| 3883 | [oAs\|oGs\|o5mCs\|o5mCs\|oAs\|dAs\|dTs\|5mCs\|dTs\|dGs\|dAs\|dGs\|5mCs\|5mCs\|dAs\|dTs\|oGs\|oAs\|oTs\|oGs\|oG] |
| 3884 | [oAs\|oGs\|o5mCp\|o5mCs\|oAs\|dAs\|dTs\|5mCs\|dTs\|dGs\|dAs\|dGs\|5mCs\|5mCs\|dAs\|dTs\|oGs\|oAs\|oTs\|oGs\|oG] |
| 3885 | [oAs\|oGs\|o5mCs\|o5mCp\|oAs\|dAs\|dTs\|5mCs\|dTs\|dGs\|dAs\|dGs\|5mCs\|5mCs\|dAs\|dTs\|oGs\|oAs\|oTs\|oGs\|oG] |
| 3886 | [oAs\|oGs\|o5mCp\|o5mCp\|oAs\|dAs\|dTs\|5mCs\|dTs\|dGs\|dAs\|dGs\|5mCs\|5mCs\|dAs\|dTs\|oGs\|oAs\|oTs\|oGs\|oG] |
| 3887 | [oAs\|oGs\|o5mCs\|o5mCs\|oAs\|dAs\|dTs\|5mCs\|dTs\|dGs\|dAs\|dGs\|5mCs\|5mCs\|dAs\|dTs\|oGp\|oAs\|oTs\|oGs\|oG] |
| 3888 | [oAs\|oGs\|o5mCs\|o5mCs\|oAs\|dAs\|dTs\|5mCs\|dTs\|dGs\|dAs\|dGs\|5mCs\|5mCs\|dAs\|dTp\|oGs\|oAs\|oTs\|oGs\|oG] |
| 3889 | [oAs\|oGs\|o5mCs\|o5mCs\|oAs\|dAs\|dTs\|5mCs\|dTs\|dGs\|dAs\|dGs\|5mCs\|5mCs\|dAs\|dTp\|oGp\|oAs\|oTs\|oGs\|oG] |
| 3890 | [oAs\|oGs\|o5mCp\|o5mCs\|oAs\|dAs\|dTs\|5mCs\|dTs\|dGs\|dAs\|dGs\|5mCs\|5mCs\|dAs\|dTs\|oGp\|oAs\|oTs\|oGs\|oG] |
| 3891 | [oAs\|oGs\|o5mCp\|o5mCs\|oAs\|dAs\|dTs\|5mCs\|dTs\|dGs\|dAs\|dGs\|5mCs\|5mCs\|dAs\|dTp\|oGs\|oAs\|oTs\|oGs\|oG] |
| 3892 | [oAs\|oGs\|o5mCs\|o5mCp\|oAs\|dAs\|dTs\|5mCs\|dTs\|dGs\|dAs\|dGs\|5mCs\|5mCs\|dAs\|dTs\|oGp\|oAs\|oTs\|oGs\|oG] |
| 3893 | [oAs\|oGs\|o5mCs\|o5mCp\|oAs\|dAs\|dTs\|5mCs\|dTs\|dGs\|dAs\|dGs\|5mCs\|5mCs\|dAs\|dTp\|oGs\|oAs\|oTs\|oGs\|oG] |
| 3894 | [oAs\|oGs\|o5mCp\|o5mCs\|oAs\|dAs\|dTs\|5mCs\|dTs\|dGs\|dAs\|dGs\|5mCs\|5mCs\|dAs\|dTp\|oGp\|oAs\|oTs\|oGs\|oG] |
| 3895 | [oAs\|oGs\|o5mCs\|o5mCp\|oAs\|dAs\|dTs\|5mCs\|dTs\|dGs\|dAs\|dGs\|5mCs\|5mCs\|dAs\|dTp\|oGp\|oAs\|oTs\|oGs\|oG] |
| 3896 | [oAs\|oGs\|o5mCp\|o5mCp\|oAs\|dAs\|dTs\|5mCs\|dTs\|dGs\|dAs\|dGs\|5mCs\|5mCs\|dAs\|dTs\|oGp\|oAs\|oTs\|oGs\|oG] |
| 3897 | [oAs\|oGs\|o5mCp\|o5mCp\|oAs\|dAs\|dTs\|5mCs\|dTs\|dGs\|dAs\|dGs\|5mCs\|5mCs\|dAs\|dTp\|oGs\|oAs\|oTs\|oGs\|oG] |
| 3898 | [oAs\|oGs\|o5mCp\|o5mCp\|oAs\|dAs\|dTs\|5mCs\|dTs\|dGs\|dAs\|dGs\|5mCs\|5mCs\|dAs\|dTp\|oGp\|oAs\|oTs\|oGs\|oG] |
| 3899 | [oAs\|oGs\|o5mCs\|o5mCs\|oAs\|dAs\|dTs\|5mCs\|dTs\|dGs\|dAs\|dGs\|5mCs\|5mCs\|dAs\|dTs\|dGs\|oAs\|oTs\|oGs\|oGs\|oT] |
| 3900 | [oAs\|oGs\|o5mCp\|o5mCs\|oAs\|dAs\|dTs\|5mCs\|dTs\|dGs\|dAs\|dGs\|5mCs\|5mCs\|dAs\|dTs\|dGs\|oAs\|oTs\|oGs\|oGs\|oT] |
| 3901 | [oAs\|oGs\|o5mCs\|o5mCp\|oAs\|dAs\|dTs\|5mCs\|dTs\|dGs\|dAs\|dGs\|5mCs\|5mCs\|dAs\|dTs\|dGs\|oAs\|oTs\|oGs\|oGs\|oT] |
| 3902 | [oAs\|oGs\|o5mCp\|o5mCp\|oAs\|dAs\|dTs\|5mCs\|dTs\|dGs\|dAs\|dGs\|5mCs\|5mCs\|dAs\|dTs\|dGs\|oAs\|oTs\|oGs\|oGs\|oT] |
| 3903 | [oAs\|oGs\|o5mCs\|o5mCs\|oAs\|dAs\|dTs\|5mCs\|dTs\|dGs\|dAs\|dGs\|5mCs\|5mCs\|dAs\|dTs\|dGp\|oAs\|oTs\|oGs\|oGs\|oT] |
| 3904 | [oAs\|oGs\|o5mCs\|o5mCs\|oAs\|dAs\|dTs\|5mCs\|dTs\|dGs\|dAs\|dGs\|5mCs\|5mCs\|dAs\|dTp\|dGs\|oAs\|oTs\|oGs\|oGs\|oT] |
| 3905 | [oAs\|oGs\|o5mCs\|o5mCs\|oAs\|dAs\|dTs\|5mCs\|dTs\|dGs\|dAs\|dGs\|5mCs\|5mCs\|dAs\|dTp\|dGp\|oAs\|oTs\|oGs\|oGs\|oT] |
| 3906 | [oAs\|oGs\|o5mCp\|o5mCs\|oAs\|dAs\|dTs\|5mCs\|dTs\|dGs\|dAs\|dGs\|5mCs\|5mCs\|dAs\|dTs\|dGp\|oAs\|oTs\|oGs\|oGs\|oT] |
| 3907 | [oAs\|oGs\|o5mCp\|o5mCs\|oAs\|dAs\|dTs\|5mCs\|dTs\|dGs\|dAs\|dGs\|5mCs\|5mCs\|dAs\|dTp\|dGs\|oAs\|oTs\|oGs\|oGs\|oT] |
| 3908 | [oAs\|oGs\|o5mCs\|o5mCp\|oAs\|dAs\|dTs\|5mCs\|dTs\|dGs\|dAs\|dGs\|5mCs\|5mCs\|dAs\|dTs\|dGp\|oAs\|oTs\|oGs\|oGs\|oT] |
| 3909 | [oAs\|oGs\|o5mCs\|o5mCp\|oAs\|dAs\|dTs\|5mCs\|dTs\|dGs\|dAs\|dGs\|5mCs\|5mCs\|dAs\|dTp\|dGs\|oAs\|oTs\|oGs\|oGs\|oT] |
| 3910 | [oAs\|oGs\|o5mCp\|o5mCs\|oAs\|dAs\|dTs\|5mCs\|dTs\|dGs\|dAs\|dGs\|5mCs\|5mCs\|dAs\|dTp\|dGp\|oAs\|oTs\|oGs\|oGs\|oT] |
| 3911 | [oAs\|oGs\|o5mCs\|o5mCp\|oAs\|dAs\|dTs\|5mCs\|dTs\|dGs\|dAs\|dGs\|5mCs\|5mCs\|dAs\|dTp\|dGp\|oAs\|oTs\|oGs\|oGs\|oT] |
| 3912 | [oAs\|oGs\|o5mCp\|o5mCp\|oAs\|dAs\|dTs\|5mCs\|dTs\|dGs\|dAs\|dGs\|5mCs\|5mCs\|dAs\|dTs\|dGp\|oAs\|oTs\|oGs\|oGs\|oT] |
| 3913 | [oAs\|oGs\|o5mCp\|o5mCp\|oAs\|dAs\|dTs\|5mCs\|dTs\|dGs\|dAs\|dGs\|5mCs\|5mCs\|dAs\|dTp\|dGs\|oAs\|oTs\|oGs\|oGs\|oT] |
| 3914 | [oAs\|oGs\|o5mCp\|o5mCp\|oAs\|dAs\|dTs\|5mCs\|dTs\|dGs\|dAs\|dGs\|5mCs\|5mCs\|dAs\|dTp\|dGp\|oAs\|oTs\|oGs\|oGs\|oT] |
| 3915 | [oGs\|LAs\|oGs\|o5mCs\|o5mCs\|oAs\|oAs\|oTs\|5mCs\|dTs\|dGs\|dAs\|dGs\|5mCs\|5mCs\|dAs\|dTs\|dGs\|oAs\|oT] |
| 3916 | [oGs\|oAs\|LGs\|o5mCs\|o5mCs\|oAs\|oAs\|oTs\|5mCs\|dTs\|dGs\|dAs\|dGs\|5mCs\|5mCs\|dAs\|dTs\|dGs\|oAs\|oT] |
| 3917 | [oGs\|oAs\|oGs\|L5mCs\|o5mCs\|oAs\|oAs\|oTs\|5mCs\|dTs\|dGs\|dAs\|dGs\|5mCs\|5mCs\|dAs\|dTs\|dGs\|oAs\|oT] |
| 3918 | [oGs\|oAs\|oGs\|o5mCs\|L5mCs\|oAs\|oAs\|oTs\|5mCs\|dTs\|dGs\|dAs\|dGs\|5mCs\|5mCs\|dAs\|dTs\|dGs\|oAs\|oT] |
| 3919 | [oGs\|oAs\|oGs\|o5mCs\|o5mCs\|LAs\|oAs\|oTs\|5mCs\|dTs\|dGs\|dAs\|dGs\|5mCs\|5mCs\|dAs\|dTs\|dGs\|oAs\|oT] |
| 3920 | [oGs\|oAs\|oGs\|o5mCs\|o5mCs\|oAs\|LAs\|oTs\|5mCs\|dTs\|dGs\|dAs\|dGs\|5mCs\|5mCs\|dAs\|dTs\|dGs\|oAs\|oT] |
| 3921 | [oGs\|oAs\|dGs\|5mCs\|5mCs\|dAs\|dAs\|dTs\|5mCs\|dTs\|dGs\|dAs\|oGs\|o5mCs\|o5mCs\|oAs\|oTs\|oGs\|LAs\|oT] |
| 3922 | [oGs\|oAs\|dGs\|5mCs\|5mCs\|dAs\|dAs\|dTs\|5mCs\|dTs\|dGs\|dAs\|oGs\|o5mCs\|o5mCs\|oAs\|oTs\|LGs\|oAs\|oT] |
| 3923 | [oGs\|oAs\|dGs\|5mCs\|5mCs\|dAs\|dAs\|dTs\|5mCs\|dTs\|dGs\|dAs\|oGs\|o5mCs\|o5mCs\|oAs\|LTs\|oGs\|oAs\|oT] |
| 3924 | [oGs\|oAs\|dGs\|5mCs\|5mCs\|dAs\|dAs\|dTs\|5mCs\|dTs\|dGs\|dAs\|oGs\|o5mCs\|o5mCs\|LAs\|oTs\|oGs\|oAs\|oT] |
| 3925 | [oGs\|oAs\|dGs\|5mCs\|5mCs\|dAs\|dAs\|dTs\|5mCs\|dTs\|dGs\|dAs\|oGs\|o5mCs\|L5mCs\|oAs\|oTs\|oGs\|oAs\|oT] |
| 3926 | [oGs\|oAs\|dGs\|5mCs\|5mCs\|dAs\|dAs\|dTs\|5mCs\|dTs\|dGs\|dAs\|oGs\|L5mCs\|o5mCs\|oAs\|oTs\|oGs\|oAs\|oT] |
| 3927 | [oGs\|LAs\|oGs\|o5mCs\|o5mCs\|oAs\|oAs\|dTs\|5mCs\|dTs\|dGs\|dAs\|dGs\|5mCs\|5mCs\|dAs\|dTs\|oGs\|oAs\|oT] |
| 3928 | [oGs\|oAs\|LGs\|o5mCs\|o5mCs\|oAs\|oAs\|dTs\|5mCs\|dTs\|dGs\|dAs\|dGs\|5mCs\|5mCs\|dAs\|dTs\|oGs\|oAs\|oT] |
| 3929 | [oGs\|oAs\|oGs\|L5mCs\|o5mCs\|oAs\|oAs\|dTs\|5mCs\|dTs\|dGs\|dAs\|dGs\|5mCs\|5mCs\|dAs\|dTs\|oGs\|oAs\|oT] |
| 3930 | [oGs\|oAs\|oGs\|o5mCs\|L5mCs\|oAs\|oAs\|dTs\|5mCs\|dTs\|dGs\|dAs\|dGs\|5mCs\|5mCs\|dAs\|dTs\|oGs\|oAs\|oT] |
| 3931 | [oGs\|oAs\|oGs\|o5mCs\|o5mCs\|LAs\|oAs\|dTs\|5mCs\|dTs\|dGs\|dAs\|dGs\|5mCs\|5mCs\|dAs\|dTs\|oGs\|oAs\|oT] |
| 3932 | [oGs\|oAs\|oGs\|5mCs\|5mCs\|dAs\|dAs\|dTs\|5mCs\|dTs\|dGs\|dAs\|dGs\|o5mCs\|o5mCs\|oAs\|oTs\|oGs\|LAs\|oT] |
| 3933 | [oGs\|oAs\|oGs\|5mCs\|5mCs\|dAs\|dAs\|dTs\|5mCs\|dTs\|dGs\|dAs\|dGs\|o5mCs\|o5mCs\|oAs\|oTs\|LGs\|oAs\|oT] |
| 3934 | [oGs\|oAs\|oGs\|5mCs\|5mCs\|dAs\|dAs\|dTs\|5mCs\|dTs\|dGs\|dAs\|dGs\|o5mCs\|o5mCs\|oAs\|LTs\|oGs\|oAs\|oT] |
| 3935 | [oGs\|oAs\|oGs\|5mCs\|5mCs\|dAs\|dAs\|dTs\|5mCs\|dTs\|dGs\|dAs\|dGs\|o5mCs\|o5mCs\|LAs\|oTs\|oGs\|oAs\|oT] |
| 3936 | [oGs\|oAs\|oGs\|5mCs\|5mCs\|dAs\|dAs\|dTs\|5mCs\|dTs\|dGs\|dAs\|dGs\|o5mCs\|L5mCs\|oAs\|oTs\|oGs\|oAs\|oT] |
| 3937 | [oGs\|LAs\|oGs\|o5mCs\|o5mCs\|oAs\|oAs\|dTs\|5mCs\|dTs\|dGs\|dAs\|dGs\|5mCs\|5mCs\|dAs\|dTs\|oGs\|oA] |
| 3938 | [oGs\|oAs\|LGs\|o5mCs\|o5mCs\|oAs\|oAs\|dTs\|5mCs\|dTs\|dGs\|dAs\|dGs\|5mCs\|5mCs\|dAs\|dTs\|oGs\|oA] |
| 3939 | [oGs\|oAs\|oGs\|L5mCs\|o5mCs\|oAs\|oAs\|dTs\|5mCs\|dTs\|dGs\|dAs\|dGs\|5mCs\|5mCs\|dAs\|dTs\|oGs\|oA] |
| 3940 | [oGs\|oAs\|oGs\|o5mCs\|L5mCs\|oAs\|oAs\|dTs\|5mCs\|dTs\|dGs\|dAs\|dGs\|5mCs\|5mCs\|dAs\|dTs\|oGs\|oA] |
| 3941 | [oGs\|oAs\|oGs\|o5mCs\|o5mCs\|LAs\|oAs\|dTs\|5mCs\|dTs\|dGs\|dAs\|dGs\|5mCs\|5mCs\|dAs\|dTs\|oGs\|oA] |
| 3942 | [oAs\|oGs\|5mCs\|5mCs\|dAs\|dAs\|dTs\|5mCs\|dTs\|dGs\|dAs\|dGs\|o5mCs\|o5mCs\|oAs\|oTs\|oGs\|LAs\|oT] |
| 3943 | [oAs\|oGs\|5mCs\|5mCs\|dAs\|dAs\|dTs\|5mCs\|dTs\|dGs\|dAs\|dGs\|o5mCs\|5mCs\|oAs\|oTs\|LGs\|oAs\|oT] |
| 3944 | [oAs\|oGs\|5mCs\|5mCs\|dAs\|dAs\|dTs\|5mCs\|dTs\|dGs\|dAs\|dGs\|o5mCs\|o5mCs\|oAs\|LTs\|oGs\|oAs\|oT] |
| 3945 | [oAs\|oGs\|5mCs\|5mCs\|dAs\|dAs\|dTs\|5mCs\|dTs\|dGs\|dAs\|dGs\|o5mCs\|o5mCs\|LAs\|oTs\|oGs\|oAs\|oT] |
| 3946 | [oAs\|oGs\|5mCs\|5mCs\|dAs\|dAs\|dTs\|5mCs\|dTs\|dGs\|dAs\|dGs\|o5mCs\|L5mCs\|oAs\|oTs\|oGs\|oAs\|oT] |
| 3947 | [oGs\|LAs\|oGs\|o5mCs\|o5mCs\|oAs\|dAs\|dTs\|5mCs\|dTs\|dGs\|dAs\|dGs\|5mCs\|5mCs\|dAs\|oTs\|oGs\|oAs\|oT] |
| 3948 | [oGs\|oAs\|LGs\|o5mCs\|o5mCs\|oAs\|dAs\|dTs\|5mCs\|dTs\|dGs\|dAs\|dGs\|5mCs\|5mCs\|dAs\|oTs\|oGs\|oAs\|oT] |
| 3949 | [oGs\|oAs\|oGs\|L5mCs\|o5mCs\|oAs\|dAs\|dTs\|5mCs\|dTs\|dGs\|dAs\|dGs\|5mCs\|5mCs\|dAs\|oTs\|oGs\|oAs\|oT] |
| 3950 | [oGs\|oAs\|oGs\|o5mCs\|L5mCs\|oAs\|dAs\|dTs\|5mCs\|dTs\|dGs\|dAs\|dGs\|5mCs\|5mCs\|dAs\|oTs\|oGs\|oAs\|oT] |
| 3951 | [oGs\|oAs\|oGs\|o5mCs\|5mCs\|dAs\|dAs\|dTs\|5mCs\|dTs\|dGs\|dAs\|dGs\|5mCs\|o5mCs\|oAs\|oTs\|oGs\|LAs\|oT] |
| 3952 | [oGs\|oAs\|oGs\|o5mCs\|5mCs\|dAs\|dAs\|dTs\|5mCs\|dTs\|dGs\|dAs\|dGs\|5mCs\|o5mCs\|oAs\|oTs\|LGs\|oAs\|oT] |
| 3953 | [oGs\|oAs\|oGs\|o5mCs\|5mCs\|dAs\|dAs\|dTs\|5mCs\|dTs\|dGs\|dAs\|dGs\|5mCs\|o5mCs\|oAs\|LTs\|oGs\|oAs\|oT] |
| 3954 | [oGs\|oAs\|oGs\|o5mCs\|5mCs\|dAs\|dAs\|dTs\|5mCs\|dTs\|dGs\|dAs\|dGs\|5mCs\|o5mCs\|LAs\|oTs\|oGs\|oAs\|oT] |
| 3955 | [oGs\|LAs\|oGs\|o5mCs\|o5mCs\|oAs\|dAs\|dTs\|5mCs\|dTs\|dGs\|dAs\|dGs\|5mCs\|5mCs\|dAs\|oTs\|oGs\|oA] |
| 3956 | [oGs\|oAs\|LGs\|o5mCs\|o5mCs\|oAs\|dAs\|dTs\|5mCs\|dTs\|dGs\|dAs\|dGs\|5mCs\|5mCs\|dAs\|oTs\|oGs\|oA] |
| 3957 | [oGs\|oAs\|oGs\|L5mCs\|o5mCs\|oAs\|dAs\|dTs\|5mCs\|dTs\|dGs\|dAs\|dGs\|5mCs\|5mCs\|dAs\|oTs\|oGs\|oA] |
| 3958 | [oGs\|oAs\|oGs\|o5mCs\|L5mCs\|oAs\|dAs\|dTs\|5mCs\|dTs\|dGs\|dAs\|dGs\|5mCs\|5mCs\|dAs\|oTs\|oGs\|oA] |
| 3959 | [oGs\|oAs\|oGs\|5mCs\|5mCs\|dAs\|dAs\|dTs\|5mCs\|dTs\|dGs\|dAs\|dGs\|5mCs\|o5mCs\|oAs\|oTs\|oGs\|LAs\|oT] |
| 3960 | [oGs\|oAs\|oGs\|5mCs\|5mCs\|dAs\|dAs\|dTs\|5mCs\|dTs\|dGs\|dAs\|dGs\|5mCs\|o5mCs\|oAs\|oTs\|LGs\|oAs\|oT] |
| 3961 | [oGs\|oAs\|oGs\|5mCs\|5mCs\|dAs\|dAs\|dTs\|5mCs\|dTs\|dGs\|dAs\|dGs\|5mCs\|o5mCs\|oAs\|LTs\|oGs\|oAs\|oT] |
| 3962 | [oGs\|LAs\|oGs\|o5mCs\|o5mCs\|oAs\|dAs\|dTs\|5mCs\|dTs\|dGs\|dAs\|dGs\|5mCs\|5mCs\|dAs\|oTs\|oG] |
| 3963 | [oGs\|oAs\|LGs\|o5mCs\|o5mCs\|oAs\|dAs\|dTs\|5mCs\|dTs\|dGs\|dAs\|dGs\|5mCs\|5mCs\|dAs\|oTs\|oG] |
| 3964 | [oGs\|oAs\|oGs\|L5mCs\|o5mCs\|oAs\|dAs\|dTs\|5mCs\|dTs\|dGs\|dAs\|dGs\|5mCs\|5mCs\|dAs\|oTs\|oG] |
| 3965 | [oGs\|oAs\|oGs\|o5mCs\|L5mCs\|oAs\|dAs\|dTs\|5mCs\|dTs\|dGs\|dAs\|dGs\|5mCs\|5mCs\|dAs\|oTs\|oG] |
| 3966 | [oGs\|o5mCs\|5mCs\|dAs\|dAs\|dTs\|5mCs\|dTs\|dGs\|dAs\|dGs\|5mCs\|o5mCs\|oAs\|oTs\|oGs\|LAs\|oT] |
| 3967 | [oGs\|o5mCs\|5mCs\|dAs\|dAs\|dTs\|5mCs\|dTs\|dGs\|dAs\|dGs\|5mCs\|o5mCs\|oAs\|oTs\|LGs\|oAs\|oT] |
| 3968 | [oGs\|o5mCs\|5mCs\|dAs\|dAs\|dTs\|5mCs\|dTs\|dGs\|dAs\|dGs\|5mCs\|o5mCs\|oAs\|LTs\|oGs\|oAs\|oT] |
| 3969 | [oGs\|o5mCs\|5mCs\|dAs\|dAs\|dTs\|5mCs\|dTs\|dGs\|dAs\|dGs\|5mCs\|o5mCs\|LAs\|oTs\|oGs\|oAs\|oT] |
| 3970 | [oGs\|LAs\|oGs\|o5mCs\|o5mCs\|dAs\|dAs\|dTs\|5mCs\|dTs\|dGs\|dAs\|dGs\|5mCs\|5mCs\|oAs\|oTs\|oGs\|oAs\|oT] |
| 3971 | [oGs\|oAs\|LGs\|o5mCs\|o5mCs\|dAs\|dAs\|dTs\|5mCs\|dTs\|dGs\|dAs\|dGs\|5mCs\|5mCs\|oAs\|oTs\|oGs\|oAs\|oT] |
| 3972 | [oGs\|oAs\|oGs\|L5mCs\|o5mCs\|dAs\|dAs\|dTs\|5mCs\|dTs\|dGs\|dAs\|dGs\|5mCs\|5mCs\|oAs\|oTs\|oGs\|oAs\|oT] |
| 3973 | [oGs\|oAs\|oGs\|o5mCs\|o5mCs\|dAs\|dAs\|dTs\|5mCs\|dTs\|dGs\|dAs\|dGs\|5mCs\|5mCs\|oAs\|oTs\|oGs\|LAs\|oT] |
| 3974 | [oGs\|oAs\|oGs\|o5mCs\|o5mCs\|dAs\|dAs\|dTs\|5mCs\|dTs\|dGs\|dAs\|dGs\|5mCs\|5mCs\|oAs\|oTs\|LGs\|oAs\|oT] |
| 3975 | [oGs\|oAs\|oGs\|o5mCs\|o5mCs\|dAs\|dAs\|dTs\|5mCs\|dTs\|dGs\|dAs\|dGs\|5mCs\|5mCs\|oAs\|LTs\|oGs\|oAs\|oT] |
| 3976 | [oGs\|LAs\|oGs\|o5mCs\|o5mCs\|dAs\|dAs\|dTs\|5mCs\|dTs\|dGs\|dAs\|dGs\|5mCs\|5mCs\|oAs\|oTs\|oGs\|oA] |
| 3977 | [oGs\|oAs\|LGs\|o5mCs\|o5mCs\|dAs\|dAs\|dTs\|5mCs\|dTs\|dGs\|dAs\|dGs\|5mCs\|5mCs\|oAs\|oTs\|oGs\|oA] |
| 3978 | [oGs\|oAs\|oGs\|L5mCs\|o5mCs\|dAs\|dAs\|dTs\|5mCs\|dTs\|dGs\|dAs\|dGs\|5mCs\|5mCs\|oAs\|oTs\|oGs\|oA] |
| 3979 | [oAs\|oGs\|o5mCs\|o5mCs\|dAs\|dAs\|dTs\|5mCs\|dTs\|dGs\|dAs\|dGs\|5mCs\|5mCs\|oAs\|oTs\|oGs\|LAs\|oT] |
| 3980 | [oAs\|oGs\|o5mCs\|o5mCs\|dAs\|dAs\|dTs\|5mCs\|dTs\|dGs\|dAs\|dGs\|5mCs\|5mCs\|oAs\|oTs\|LGs\|oAs\|oT] |
| 3981 | [oAs\|oGs\|o5mCs\|o5mCs\|dAs\|dAs\|dTs\|5mCs\|dTs\|dGs\|dAs\|dGs\|5mCs\|5mCs\|oAs\|LTs\|oGs\|oAs\|oT] |
| 3982 | [oGs\|LAs\|oGs\|o5mCs\|o5mCs\|dAs\|dAs\|dTs\|5mCs\|dTs\|dGs\|dAs\|dGs\|5mCs\|5mCs\|oAs\|oTs\|oG] |
| 3983 | [oGs\|oAs\|LGs\|o5mCs\|o5mCs\|dAs\|dAs\|dTs\|5mCs\|dTs\|dGs\|dAs\|dGs\|5mCs\|5mCs\|oAs\|oTs\|oG] |
| 3984 | [oGs\|oAs\|oGs\|L5mCs\|o5mCs\|dAs\|dAs\|dTs\|5mCs\|dTs\|dGs\|dAs\|dGs\|5mCs\|5mCs\|oAs\|oTs\|oG] |
| 3985 | [oGs\|o5mCs\|o5mCs\|dAs\|dAs\|dTs\|5mCs\|dTs\|dGs\|dAs\|dGs\|5mCs\|5mCs\|oAs\|oTs\|oGs\|LAs\|oT] |
| 3986 | [oGs\|o5mCs\|o5mCs\|dAs\|dAs\|dTs\|5mCs\|dTs\|dGs\|dAs\|dGs\|5mCs\|5mCs\|oAs\|oTs\|LGs\|oAs\|oT] |
| 3987 | [oGs\|o5mCs\|o5mCs\|dAs\|dAs\|dTs\|5mCs\|dTs\|dGs\|dAs\|dGs\|5mCs\|5mCs\|oAs\|LTs\|oGs\|oAs\|oT] |
| 3988 | [oGs\|LAs\|oGs\|o5mCs\|o5mCs\|dAs\|dAs\|dTs\|5mCs\|dTs\|dGs\|dAs\|dGs\|5mCs\|5mCs\|oAs\|oT] |
| 3989 | [oGs\|oAs\|LGs\|o5mCs\|o5mCs\|dAs\|dAs\|dTs\|5mCs\|dTs\|dGs\|dAs\|dGs\|5mCs\|5mCs\|oAs\|oT] |
| 3990 | [oGs\|oAs\|oGs\|L5mCs\|o5mCs\|dAs\|dAs\|dTs\|5mCs\|dTs\|dGs\|dAs\|dGs\|5mCs\|5mCs\|oAs\|oT] |
| 3991 | [o5mCs\|o5mCs\|dAs\|dAs\|dTs\|5mCs\|dTs\|dGs\|dAs\|dGs\|5mCs\|5mCs\|oAs\|oTs\|oGs\|LAs\|oT] |
| 3992 | [o5mCs\|o5mCs\|dAs\|dAs\|dTs\|5mCs\|dTs\|dGs\|dAs\|dGs\|5mCs\|5mCs\|oAs\|oTs\|LGs\|oAs\|oT] |
| 3993 | [o5mCs\|o5mCs\|dAs\|dAs\|dTs\|5mCs\|dTs\|dGs\|dAs\|dGs\|5mCs\|5mCs\|oAs\|LTs\|oGs\|oAs\|oT] |
| 3994 | [oAs\|LGs\|o5mCs\|o5mCs\|dAs\|dAs\|dTs\|5mCs\|dTs\|dGs\|dAs\|dGs\|5mCs\|5mCs\|oAs\|oTs\|oGs\|oAs\|oT] |
| 3995 | [oAs\|oGs\|L5mCs\|o5mCs\|dAs\|dAs\|dTs\|5mCs\|dTs\|dGs\|dAs\|dGs\|5mCs\|5mCs\|oAs\|oTs\|oGs\|oAs\|oT] |
| 3996 | [oGs\|oAs\|oGs\|o5mCs\|o5mCs\|dAs\|dAs\|dTs\|5mCs\|dTs\|dGs\|dAs\|dGs\|5mCs\|5mCs\|oAs\|oTs\|LGs\|oA] |
| 3997 | [oGs\|oAs\|oGs\|o5mCs\|o5mCs\|dAs\|dAs\|dTs\|5mCs\|dTs\|dGs\|dAs\|dGs\|5mCs\|5mCs\|oAs\|LTs\|oGs\|oA] |
| 3998 | [oAs\|LGs\|o5mCs\|o5mCs\|dAs\|dAs\|dTs\|5mCs\|dTs\|dGs\|dAs\|dGs\|5mCs\|5mCs\|oAs\|oTs\|oGs\|oA] |
| 3999 | [oAs\|oGs\|L5mCs\|o5mCs\|dAs\|dAs\|dTs\|5mCs\|dTs\|dGs\|dAs\|dGs\|5mCs\|5mCs\|oAs\|oTs\|oGs\|oA] |
| 4000 | [oAs\|oGs\|o5mCs\|o5mCs\|dAs\|dAs\|dTs\|5mCs\|dTs\|dGs\|dAs\|dGs\|5mCs\|5mCs\|oAs\|oTs\|LGs\|oA] |
| 4001 | [oAs\|oGs\|o5mCs\|o5mCs\|dAs\|dAs\|dTs\|5mCs\|dTs\|dGs\|dAs\|dGs\|5mCs\|5mCs\|oAs\|LTs\|oGs\|oA] |
| 4002 | [oAs\|LGs\|o5mCs\|o5mCs\|dAs\|dAs\|dTs\|5mCs\|dTs\|dGs\|dAs\|dGs\|5mCs\|5mCs\|oAs\|oTs\|oG] |
| 4003 | [oAs\|oGs\|L5mCs\|o5mCs\|dAs\|dAs\|dTs\|5mCs\|dTs\|dGs\|dAs\|dGs\|5mCs\|5mCs\|oAs\|oTs\|oG] |
| 4004 | [oAs\|oGs\|o5mCs\|o5mCs\|dAs\|dAs\|dTs\|5mCs\|dTs\|dGs\|dAs\|dGs\|5mCs\|5mCs\|oAs\|LTs\|oG] |
| 4005 | [oGs\|oAs\|oGs\|o5mCs\|o5mCs\|oAs\|oAs\|oTs\|5mCs\|dTs\|dGs\|dAs\|dGs\|5mCs\|5mCs\|dAs\|dTs\|dGs\|oAs\|oT] |
| 4006 | [oGs\|oAs\|dGs\|5mCs\|5mCs\|dAs\|dAs\|dTs\|5mCs\|dTs\|dGs\|dAs\|oGs\|o5mCs\|o5mCs\|oAs\|oTs\|oGs\|oAs\|oT] |
| 4007 | [oGs\|oAs\|oGs\|o5mCs\|o5mCs\|oAs\|oAs\|dTs\|5mCs\|dTs\|dGs\|dAs\|dGs\|5mCs\|5mCs\|dAs\|dTs\|oGs\|oAs\|oT] |
| 4008 | [oGs\|oAs\|oGs\|5mCs\|5mCs\|dAs\|dAs\|dTs\|5mCs\|dTs\|dGs\|dAs\|dGs\|o5mCs\|o5mCs\|oAs\|oTs\|oGs\|oAs\|oT] |
| 4009 | [oGs\|oAs\|oGs\|o5mCs\|o5mCs\|oAs\|oAs\|dTs\|5mCs\|dTs\|dGs\|dAs\|dGs\|5mCs\|5mCs\|dAs\|dTs\|oGs\|oA] |
| 4010 | [oAs\|oGs\|5mCs\|5mCs\|dAs\|dAs\|dTs\|5mCs\|dTs\|dGs\|dAs\|dGs\|o5mCs\|o5mCs\|oAs\|oTs\|oGs\|oAs\|oT] |
| 4011 | [oGs\|oAs\|oGs\|o5mCs\|o5mCs\|oAs\|dAs\|dTs\|5mCs\|dTs\|dGs\|dAs\|dGs\|5mCs\|5mCs\|dAs\|oTs\|oGs\|oAs\|oT] |
| 4012 | [oGs\|oAs\|oGs\|o5mCs\|5mCs\|dAs\|dAs\|dTs\|5mCs\|dTs\|dGs\|dAs\|dGs\|5mCs\|o5mCs\|oAs\|oTs\|oGs\|oAs\|oT] |
| 4013 | [oGs\|oAs\|oGs\|o5mCs\|o5mCs\|oAs\|dAs\|dTs\|5mCs\|dTs\|dGs\|dAs\|dGs\|5mCs\|5mCs\|dAs\|oTs\|oGs\|oA] |
| 4014 | [oGs\|oAs\|oGs\|5mCs\|5mCs\|dAs\|dAs\|dTs\|5mCs\|dTs\|dGs\|dAs\|dGs\|5mCs\|o5mCs\|oAs\|oTs\|oGs\|oAs\|oT] |
| 4015 | [oGs\|oAs\|oGs\|o5mCs\|o5mCs\|oAs\|dAs\|dTs\|5mCs\|dTs\|dGs\|dAs\|dGs\|5mCs\|5mCs\|dAs\|oTs\|oG] |
| 4016 | [oGs\|o5mCs\|5mCs\|dAs\|dAs\|dTs\|5mCs\|dTs\|dGs\|dAs\|dGs\|5mCs\|o5mCs\|oAs\|oTs\|oGs\|oAs\|oT] |
| 4017 | [oGs\|oAs\|oGs\|o5mCs\|o5mCs\|dAs\|dAs\|dTs\|5mCs\|dTs\|dGs\|dAs\|dGs\|5mCs\|5mCs\|oAs\|oTs\|oGs\|oAs\|oT] |
| 4018 | [oGs\|oAs\|oGs\|o5mCs\|o5mCs\|dAs\|dAs\|dTs\|5mCs\|dTs\|dGs\|dAs\|dGs\|5mCs\|5mCs\|oAs\|oTs\|oGs\|oA] |
| 4019 | [oGs\|oAs\|oGs\|o5mCs\|o5mCs\|dAs\|dAs\|dTs\|5mCs\|dTs\|dGs\|dAs\|dGs\|5mCs\|5mCs\|oAs\|oTs\|oG] |
| 4020 | [oGs\|o5mCs\|o5mCs\|dAs\|dAs\|dTs\|5mCs\|dTs\|dGs\|dAs\|dGs\|5mCs\|5mCs\|oAs\|oTs\|oGs\|oAs\|oT] |
| 4021 | [oGs\|oAs\|oGs\|o5mCs\|o5mCs\|dAs\|dAs\|dTs\|5mCs\|dTs\|dGs\|dAs\|dGs\|5mCs\|5mCs\|oAs\|oT] |
| 4022 | [o5mCs\|o5mCs\|dAs\|dAs\|dTs\|5mCs\|dTs\|dGs\|dAs\|dGs\|5mCs\|5mCs\|oAs\|oTs\|oGs\|oAs\|oT] |
| 4023 | [oAs\|oGs\|o5mCs\|o5mCs\|dAs\|dAs\|dTs\|5mCs\|dTs\|dGs\|dAs\|dGs\|5mCs\|5mCs\|oAs\|oTs\|oGs\|oAs\|oT] |
| 4024 | [oAs\|oGs\|o5mCs\|o5mCs\|dAs\|dAs\|dTs\|5mCs\|dTs\|dGs\|dAs\|dGs\|5mCs\|5mCs\|oAs\|oTs\|oGs\|oA] |
| 4025 | [oAs\|oGs\|o5mCs\|o5mCs\|dAs\|dAs\|dTs\|5mCs\|dTs\|dGs\|dAs\|dGs\|5mCs\|5mCs\|oAs\|oTs\|oG] |
| 4026 | [oGs\|oAs\|oGp\|o5mCs\|o5mCs\|dAs\|dAs\|dTs\|5mCs\|dTs\|dGs\|dAs\|dGs\|5mCs\|5mCs\|oAs\|oTs\|oGs\|oAs\|oT] |
| 4027 | [oGs\|oAs\|oGs\|o5mCp\|o5mCs\|dAs\|dAs\|dTs\|5mCs\|dTs\|dGs\|dAs\|dGs\|5mCs\|5mCs\|oAs\|oTs\|oGs\|oAs\|oT] |
| 4028 | [oGs\|oAs\|oGp\|o5mCp\|o5mCs\|dAs\|dAs\|dTs\|5mCs\|dTs\|dGs\|dAs\|dGs\|5mCs\|5mCs\|oAs\|oTs\|oGs\|oAs\|oT] |
| 4029 | [oGs\|oAs\|oGs\|o5mCs\|o5mCs\|dAs\|dAs\|dTs\|5mCs\|dTs\|dGs\|dAs\|dGs\|5mCs\|5mCs\|oAs\|oTp\|oGs\|oAs\|oT] |
| 4030 | [oGs\|oAs\|oGs\|o5mCs\|o5mCs\|dAs\|dAs\|dTs\|5mCs\|dTs\|dGs\|dAs\|dGs\|5mCs\|5mCs\|oAp\|oTs\|oGs\|oAs\|oT] |
| 4031 | [oGs\|oAs\|oGs\|o5mCs\|o5mCs\|dAs\|dAs\|dTs\|5mCs\|dTs\|dGs\|dAs\|dGs\|5mCs\|5mCs\|oAp\|oTp\|oGs\|oAs\|oT] |
| 4032 | [oGs\|oAs\|oGp\|o5mCs\|o5mCs\|dAs\|dAs\|dTs\|5mCs\|dTs\|dGs\|dAs\|dGs\|5mCs\|5mCs\|oAs\|oTp\|oGs\|oAs\|oT] |
| 4033 | [oGs\|oAs\|oGp\|o5mCs\|o5mCs\|dAs\|dAs\|dTs\|5mCs\|dTs\|dGs\|dAs\|dGs\|5mCs\|5mCs\|oAp\|oTs\|oGs\|oAs\|oT] |
| 4034 | [oGs\|oAs\|oGs\|o5mCp\|o5mCs\|dAs\|dAs\|dTs\|5mCs\|dTs\|dGs\|dAs\|dGs\|5mCs\|5mCs\|oAs\|oTp\|oGs\|oAs\|oT] |
| 4035 | [oGs\|oAs\|oGs\|o5mCp\|o5mCs\|dAs\|dAs\|dTs\|5mCs\|dTs\|dGs\|dAs\|dGs\|5mCs\|5mCs\|oAp\|oTs\|oGs\|oAs\|oT] |
| 4036 | [oGs\|oAs\|oGp\|o5mCs\|o5mCs\|dAs\|dAs\|dTs\|5mCs\|dTs\|dGs\|dAs\|dGs\|5mCs\|5mCs\|oAp\|oTp\|oGs\|oAs\|oT] |
| 4037 | [oGs\|oAs\|oGs\|o5mCp\|o5mCs\|dAs\|dAs\|dTs\|5mCs\|dTs\|dGs\|dAs\|dGs\|5mCs\|5mCs\|oAp\|oTp\|oGs\|oAs\|oT] |
| 4038 | [oGs\|oAs\|oGp\|o5mCp\|o5mCs\|dAs\|dAs\|dTs\|5mCs\|dTs\|dGs\|dAs\|dGs\|5mCs\|5mCs\|oAs\|oTp\|oGs\|oAs\|oT] |
| 4039 | [oGs\|oAs\|oGp\|o5mCp\|o5mCs\|dAs\|dAs\|dTs\|5mCs\|dTs\|dGs\|dAs\|dGs\|5mCs\|5mCs\|oAp\|oTs\|oGs\|oAs\|oT] |
| 4040 | [oGs\|oAs\|oGp\|o5mCp\|o5mCs\|dAs\|dAs\|dTs\|5mCs\|dTs\|dGs\|dAs\|dGs\|5mCs\|5mCs\|oAp\|oTp\|oGs\|oAs\|oT] |
| 4041 | [oGs\|oAs\|oGs\|o5mCs\|o5mCs\|dAs\|dAs\|dTs\|5mCs\|dTs\|dGs\|dAs\|dGs\|5mCs\|5mCs\|oAs\|oTs\|oGs\|oAs\|oTs\|oG] |
| 4042 | [oGs\|oAs\|oGp\|o5mCs\|o5mCs\|dAs\|dAs\|dTs\|5mCs\|dTs\|dGs\|dAs\|dGs\|5mCs\|5mCs\|oAs\|oTs\|oGs\|oAs\|oTs\|oG] |
| 4043 | [oGs\|oAs\|oGs\|o5mCp\|o5mCs\|dAs\|dAs\|dTs\|5mCs\|dTs\|dGs\|dAs\|dGs\|5mCs\|5mCs\|oAs\|oTs\|oGs\|oAs\|oTs\|oG] |
| 4044 | [oGs\|oAs\|oGp\|o5mCp\|o5mCs\|dAs\|dAs\|dTs\|5mCs\|dTs\|dGs\|dAs\|dGs\|5mCs\|5mCs\|oAs\|oTs\|oGs\|oAs\|oTs\|oG] |
| 4045 | [oGs\|oAs\|oGs\|o5mCs\|o5mCs\|dAs\|dAs\|dTs\|5mCs\|dTs\|dGs\|dAs\|dGs\|5mCs\|5mCs\|oAs\|oTp\|oGs\|oAs\|oTs\|oG] |
| 4046 | [oGs\|oAs\|oGs\|o5mCs\|o5mCs\|dAs\|dAs\|dTs\|5mCs\|dTs\|dGs\|dAs\|dGs\|5mCs\|5mCs\|oAp\|oTs\|oGs\|oAs\|oTs\|oG] |
| 4047 | [oGs\|oAs\|oGs\|o5mCs\|o5mCs\|dAs\|dAs\|dTs\|5mCs\|dTs\|dGs\|dAs\|dGs\|5mCs\|5mCs\|oAp\|oTp\|oGs\|oAs\|oTs\|oG] |
| 4048 | [oGs\|oAs\|oGp\|o5mCs\|o5mCs\|dAs\|dAs\|dTs\|5mCs\|dTs\|dGs\|dAs\|dGs\|5mCs\|5mCs\|oAs\|oTp\|oGs\|oAs\|oTs\|oG] |
| 4049 | [oGs\|oAs\|oGp\|o5mCs\|o5mCs\|dAs\|dAs\|dTs\|5mCs\|dTs\|dGs\|dAs\|dGs\|5mCs\|5mCs\|oAp\|oTs\|oGs\|oAs\|oTs\|oG] |
| 4050 | [oGs\|oAs\|oGs\|o5mCp\|o5mCs\|dAs\|dAs\|dTs\|5mCs\|dTs\|dGs\|dAs\|dGs\|5mCs\|5mCs\|oAs\|oTp\|oGs\|oAs\|oTs\|oG] |
| 4051 | [oGs\|oAs\|oGs\|o5mCp\|o5mCs\|dAs\|dAs\|dTs\|5mCs\|dTs\|dGs\|dAs\|dGs\|5mCs\|5mCs\|oAp\|oTs\|oGs\|oAs\|oTs\|oG] |
| 4052 | [oGs\|oAs\|oGp\|o5mCs\|o5mCs\|dAs\|dAs\|dTs\|5mCs\|dTs\|dGs\|dAs\|dGs\|5mCs\|5mCs\|oAp\|oTp\|oGs\|oAs\|oTs\|oG] |
| 4053 | [oGs\|oAs\|oGs\|o5mCp\|o5mCs\|dAs\|dAs\|dTs\|5mCs\|dTs\|dGs\|dAs\|dGs\|5mCs\|5mCs\|oAp\|oTp\|oGs\|oAs\|oTs\|oG] |
| 4054 | [oGs\|oAs\|oGp\|o5mCp\|o5mCs\|dAs\|dAs\|dTs\|5mCs\|dTs\|dGs\|dAs\|dGs\|5mCs\|5mCs\|oAs\|oTp\|oGs\|oAs\|oTs\|oG] |
| 4055 | [oGs\|oAs\|oGp\|o5mCp\|o5mCs\|dAs\|dAs\|dTs\|5mCs\|dTs\|dGs\|dAs\|dGs\|5mCs\|5mCs\|oAp\|oTs\|oGs\|oAs\|oTs\|oG] |
| 4056 | [oGs\|oAs\|oGp\|o5mCp\|o5mCs\|dAs\|dAs\|dTs\|5mCs\|dTs\|dGs\|dAs\|dGs\|5mCs\|5mCs\|oAp\|oTp\|oGs\|oAs\|oTs\|oG] |
| 4057 | [oGs\|oAs\|oGs\|o5mCs\|o5mCs\|dAs\|dAs\|dTs\|5mCs\|dTs\|dGs\|dAs\|dGs\|5mCs\|5mCs\|oAs\|oTs\|oGs\|oAs\|oTs\|oGs\|oG] |
| 4058 | [oGs\|oAs\|oGp\|o5mCs\|o5mCs\|dAs\|dAs\|dTs\|5mCs\|dTs\|dGs\|dAs\|dGs\|5mCs\|5mCs\|oAs\|oTs\|oGs\|oAs\|oTs\|oGs\|oG] |
| 4059 | [oGs\|oAs\|oGs\|o5mCp\|o5mCs\|dAs\|dAs\|dTs\|5mCs\|dTs\|dGs\|dAs\|dGs\|5mCs\|5mCs\|oAs\|oTs\|oGs\|oAs\|oTs\|oGs\|oG] |
| 4060 | [oGs\|oAs\|oGp\|o5mCp\|o5mCs\|dAs\|dAs\|dTs\|5mCs\|dTs\|dGs\|dAs\|dGs\|5mCs\|5mCs\|oAs\|oTs\|oGs\|oAs\|oTs\|oGs\|oG] |
| 4061 | [oGs\|oAs\|oGs\|o5mCs\|o5mCs\|dAs\|dAs\|dTs\|5mCs\|dTs\|dGs\|dAs\|dGs\|5mCs\|5mCs\|oAs\|oTp\|oGs\|oAs\|oTs\|oGs\|oG] |
| 4062 | [oGs\|oAs\|oGs\|o5mCs\|o5mCs\|dAs\|dAs\|dTs\|5mCs\|dTs\|dGs\|dAs\|dGs\|5mCs\|5mCs\|oAp\|oTs\|oGs\|oAs\|oTs\|oGs\|oG] |
| 4063 | [oGs\|oAs\|oGs\|o5mCs\|o5mCs\|dAs\|dAs\|dTs\|5mCs\|dTs\|dGs\|dAs\|dGs\|5mCs\|5mCs\|oAp\|oTp\|oGs\|oAs\|oTs\|oGs\|oG] |
| 4064 | [oGs\|oAs\|oGp\|o5mCs\|o5mCs\|dAs\|dAs\|dTs\|5mCs\|dTs\|dGs\|dAs\|dGs\|5mCs\|5mCs\|oAs\|oTp\|oGs\|oAs\|oTs\|oGs\|oG] |
| 4065 | [oGs\|oAs\|oGp\|o5mCs\|o5mCs\|dAs\|dAs\|dTs\|5mCs\|dTs\|dGs\|dAs\|dGs\|5mCs\|5mCs\|oAp\|oTs\|oGs\|oAs\|oTs\|oGs\|oG] |
| 4066 | [oGs\|oAs\|oGs\|o5mCp\|o5mCs\|dAs\|dAs\|dTs\|5mCs\|dTs\|dGs\|dAs\|dGs\|5mCs\|5mCs\|oAs\|oTp\|oGs\|oAs\|oTs\|oGs\|oG] |
| 4067 | [oGs\|oAs\|oGs\|o5mCp\|o5mCs\|dAs\|dAs\|dTs\|5mCs\|dTs\|dGs\|dAs\|dGs\|5mCs\|5mCs\|oAp\|oTs\|oGs\|oAs\|oTs\|oGs\|oG] |
| 4068 | [oGs\|oAs\|oGp\|o5mCs\|o5mCs\|dAs\|dAs\|dTs\|5mCs\|dTs\|dGs\|dAs\|dGs\|5mCs\|5mCs\|oAp\|oTp\|oGs\|oAs\|oTs\|oGs\|oG] |
| 4069 | [oGs\|oAs\|oGs\|o5mCp\|o5mCs\|dAs\|dAs\|dTs\|5mCs\|dTs\|dGs\|dAs\|dGs\|5mCs\|5mCs\|oAp\|oTp\|oGs\|oAs\|oTs\|oGs\|oG] |
| 4070 | [oGs\|oAs\|oGp\|o5mCp\|o5mCs\|dAs\|dAs\|dTs\|5mCs\|dTs\|dGs\|dAs\|dGs\|5mCs\|5mCs\|oAs\|oTp\|oGs\|oAs\|oTs\|oGs\|oG] |
| 4071 | [oGs\|oAs\|oGp\|o5mCp\|o5mCs\|dAs\|dAs\|dTs\|5mCs\|dTs\|dGs\|dAs\|dGs\|5mCs\|5mCs\|oAp\|oTs\|oGs\|oAs\|oTs\|oGs\|oG] |
| 4072 | [oGs\|oAs\|oGp\|o5mCp\|o5mCs\|dAs\|dAs\|dTs\|5mCs\|dTs\|dGs\|dAs\|dGs\|5mCs\|5mCs\|oAp\|oTp\|oGs\|oAs\|oTs\|oGs\|oG] |
| 4073 | [oGs\|oAs\|oGs\|o5mCs\|o5mCs\|dAs\|dAs\|dTs\|5mCs\|dTs\|dGs\|dAs\|dGs\|5mCs\|5mCs\|oAs\|oTs\|oGs\|oAs\|oTs\|oGs\|oGs\|oT] |
| 4074 | [oGs\|oAs\|oGp\|o5mCs\|o5mCs\|dAs\|dAs\|dTs\|5mCs\|dTs\|dGs\|dAs\|dGs\|5mCs\|5mCs\|oAs\|oTs\|oGs\|oAs\|oTs\|oGs\|oGs\|oT] |
| 4075 | [oGs\|oAs\|oGs\|o5mCp\|o5mCs\|dAs\|dAs\|dTs\|5mCs\|dTs\|dGs\|dAs\|dGs\|5mCs\|5mCs\|oAs\|oTs\|oGs\|oAs\|oTs\|oGs\|oGs\|oT] |
| 4076 | [oGs\|oAs\|oGp\|o5mCp\|o5mCs\|dAs\|dAs\|dTs\|5mCs\|dTs\|dGs\|dAs\|dGs\|5mCs\|5mCs\|oAs\|oTs\|oGs\|oAs\|oTs\|oGs\|oGs\|oT] |
| 4077 | [oGs\|oAs\|oGs\|o5mCs\|o5mCs\|dAs\|dAs\|dTs\|5mCs\|dTs\|dGs\|dAs\|dGs\|5mCs\|5mCs\|oAs\|oTp\|oGs\|oAs\|oTs\|oGs\|oGs\|oT] |
| 4078 | [oGs\|oAs\|oGs\|o5mCs\|o5mCs\|dAs\|dAs\|dTs\|5mCs\|dTs\|dGs\|dAs\|dGs\|5mCs\|5mCs\|oAp\|oTs\|oGs\|oAs\|oTs\|oGs\|oGs\|oT] |
| 4079 | [oGs\|oAs\|oGs\|o5mCs\|o5mCs\|dAs\|dAs\|dTs\|5mCs\|dTs\|dGs\|dAs\|dGs\|5mCs\|5mCs\|oAp\|oTp\|oGs\|oAs\|oTs\|oGs\|oGs\|oT] |
| 4080 | [oGs\|oAs\|oGp\|o5mCs\|o5mCs\|dAs\|dAs\|dTs\|5mCs\|dTs\|dGs\|dAs\|dGs\|5mCs\|5mCs\|oAs\|oTp\|oGs\|oAs\|oTs\|oGs\|oGs\|oT] |
| 4081 | [oGs\|oAs\|oGp\|o5mCs\|o5mCs\|dAs\|dAs\|dTs\|5mCs\|dTs\|dGs\|dAs\|dGs\|5mCs\|5mCs\|oAp\|oTs\|oGs\|oAs\|oTs\|oGs\|oGs\|oT] |
| 4082 | [oGs\|oAs\|oGs\|o5mCp\|o5mCs\|dAs\|dAs\|dTs\|5mCs\|dTs\|dGs\|dAs\|dGs\|5mCs\|5mCs\|oAs\|oTp\|oGs\|oAs\|oTs\|oGs\|oGs\|oT] |
| 4083 | [oGs\|oAs\|oGs\|o5mCp\|o5mCs\|dAs\|dAs\|dTs\|5mCs\|dTs\|dGs\|dAs\|dGs\|5mCs\|5mCs\|oAp\|oTs\|oGs\|oAs\|oTs\|oGs\|oGs\|oT] |
| 4084 | [oGs\|oAs\|oGp\|o5mCs\|o5mCs\|dAs\|dAs\|dTs\|5mCs\|dTs\|dGs\|dAs\|dGs\|5mCs\|5mCs\|oAp\|oTp\|oGs\|oAs\|oTs\|oGs\|oGs\|oT] |
| 4085 | [oGs\|oAs\|oGs\|o5mCp\|o5mCs\|dAs\|dAs\|dTs\|5mCs\|dTs\|dGs\|dAs\|dGs\|5mCs\|5mCs\|oAp\|oTp\|oGs\|oAs\|oTs\|oGs\|oGs\|oT] |
| 4086 | [oGs\|oAs\|oGp\|o5mCp\|o5mCs\|dAs\|dAs\|dTs\|5mCs\|dTs\|dGs\|dAs\|dGs\|5mCs\|5mCs\|oAs\|oTp\|oGs\|oAs\|oTs\|oGs\|oGs\|oT] |
| 4087 | [oGs\|oAs\|oGp\|o5mCp\|o5mCs\|dAs\|dAs\|dTs\|5mCs\|dTs\|dGs\|dAs\|dGs\|5mCs\|5mCs\|oAp\|oTs\|oGs\|oAs\|oTs\|oGs\|oGs\|oT] |
| 4088 | [oGs\|oAs\|oGp\|o5mCp\|o5mCs\|dAs\|dAs\|dTs\|5mCs\|dTs\|dGs\|dAs\|dGs\|5mCs\|5mCs\|oAp\|oTp\|oGs\|oAs\|oTs\|oGs\|oGs\|oT] |
| 4089 | [oGs\|oAs\|oGs\|o5mCs\|o5mCs\|dAs\|dAs\|dTs\|5mCs\|dTs\|dGs\|dAs\|dGs\|5mCs\|5mCs\|dAs\|oTs\|oGs\|oAs\|oTs\|oG] |
| 4090 | [oGs\|oAs\|oGp\|o5mCs\|o5mCs\|dAs\|dAs\|dTs\|5mCs\|dTs\|dGs\|dAs\|dGs\|5mCs\|5mCs\|dAs\|oTs\|oGs\|oAs\|oTs\|oG] |
| 4091 | [oGs\|oAs\|oGs\|o5mCp\|o5mCs\|dAs\|dAs\|dTs\|5mCs\|dTs\|dGs\|dAs\|dGs\|5mCs\|5mCs\|dAs\|oTs\|oGs\|oAs\|oTs\|oG] |
| 4092 | [oGs\|oAs\|oGp\|o5mCp\|o5mCs\|dAs\|dAs\|dTs\|5mCs\|dTs\|dGs\|dAs\|dGs\|5mCs\|5mCs\|dAs\|oTs\|oGs\|oAs\|oTs\|oG] |
| 4093 | [oGs\|oAs\|oGs\|o5mCs\|o5mCs\|dAs\|dAs\|dTs\|5mCs\|dTs\|dGs\|dAs\|dGs\|5mCs\|5mCs\|dAs\|oTp\|oGs\|oAs\|oTs\|oG] |
| 4094 | [oGs\|oAs\|oGs\|o5mCs\|o5mCs\|dAs\|dAs\|dTs\|5mCs\|dTs\|dGs\|dAs\|dGs\|5mCs\|5mCs\|dAp\|oTs\|oGs\|oAs\|oTs\|oG] |
| 4095 | [oGs\|oAs\|oGs\|o5mCs\|o5mCs\|dAs\|dAs\|dTs\|5mCs\|dTs\|dGs\|dAs\|dGs\|5mCs\|5mCs\|dAp\|oTp\|oGs\|oAs\|oTs\|oG] |
| 4096 | [oGs\|oAs\|oGp\|o5mCs\|o5mCs\|dAs\|dAs\|dTs\|5mCs\|dTs\|dGs\|dAs\|dGs\|5mCs\|5mCs\|dAs\|oTp\|oGs\|oAs\|oTs\|oG] |
| 4097 | [oGs\|oAs\|oGp\|o5mCs\|o5mCs\|dAs\|dAs\|dTs\|5mCs\|dTs\|dGs\|dAs\|dGs\|5mCs\|5mCs\|dAp\|oTs\|oGs\|oAs\|oTs\|oG] |
| 4098 | [oGs\|oAs\|oGs\|o5mCp\|o5mCs\|dAs\|dAs\|dTs\|5mCs\|dTs\|dGs\|dAs\|dGs\|5mCs\|5mCs\|dAs\|oTp\|oGs\|oAs\|oTs\|oG] |
| 4099 | [oGs\|oAs\|oGs\|o5mCp\|o5mCs\|dAs\|dAs\|dTs\|5mCs\|dTs\|dGs\|dAs\|dGs\|5mCs\|5mCs\|dAp\|oTs\|oGs\|oAs\|oTs\|oG] |
| 4100 | [oGs\|oAs\|oGp\|o5mCs\|o5mCs\|dAs\|dAs\|dTs\|5mCs\|dTs\|dGs\|dAs\|dGs\|5mCs\|5mCs\|dAp\|oTp\|oGs\|oAs\|oTs\|oG] |
| 4101 | [oGs\|oAs\|oGs\|o5mCp\|o5mCs\|dAs\|dAs\|dTs\|5mCs\|dTs\|dGs\|dAs\|dGs\|5mCs\|5mCs\|dAp\|oTp\|oGs\|oAs\|oTs\|oG] |
| 4102 | [oGs\|oAs\|oGp\|o5mCp\|o5mCs\|dAs\|dAs\|dTs\|5mCs\|dTs\|dGs\|dAs\|dGs\|5mCs\|5mCs\|dAs\|oTp\|oGs\|oAs\|oTs\|oG] |
| 4103 | [oGs\|oAs\|oGp\|o5mCp\|o5mCs\|dAs\|dAs\|dTs\|5mCs\|dTs\|dGs\|dAs\|dGs\|5mCs\|5mCs\|dAp\|oTs\|oGs\|oAs\|oTs\|oG] |
| 4104 | [oGs\|oAs\|oGp\|o5mCp\|o5mCs\|dAs\|dAs\|dTs\|5mCs\|dTs\|dGs\|dAs\|dGs\|5mCs\|5mCs\|dAp\|oTp\|oGs\|oAs\|oTs\|oG] |
| 4105 | [oGs\|oAs\|oGs\|o5mCs\|o5mCs\|dAs\|dAs\|dTs\|5mCs\|dTs\|dGs\|dAs\|dGs\|5mCs\|5mCs\|dAs\|dTs\|oGs\|oAs\|oTs\|oGs\|oG] |
| 4106 | [oGs\|oAs\|oGp\|o5mCs\|o5mCs\|dAs\|dAs\|dTs\|5mCs\|dTs\|dGs\|dAs\|dGs\|5mCs\|5mCs\|dAs\|dTs\|oGs\|oAs\|oTs\|oGs\|oG] |
| 4107 | [oGs\|oAs\|oGs\|o5mCp\|o5mCs\|dAs\|dAs\|dTs\|5mCs\|dTs\|dGs\|dAs\|dGs\|5mCs\|5mCs\|dAs\|dTs\|oGs\|oAs\|oTs\|oGs\|oG] |
| 4108 | [oGs\|oAs\|oGp\|o5mCp\|o5mCs\|dAs\|dAs\|dTs\|5mCs\|dTs\|dGs\|dAs\|dGs\|5mCs\|5mCs\|dAs\|dTs\|oGs\|oAs\|oTs\|oGs\|oG] |
| 4109 | [oGs\|oAs\|oGs\|o5mCs\|o5mCs\|dAs\|dAs\|dTs\|5mCs\|dTs\|dGs\|dAs\|dGs\|5mCs\|5mCs\|dAs\|dTp\|oGs\|oAs\|oTs\|oGs\|oG] |
| 4110 | [oGs\|oAs\|oGs\|o5mCs\|o5mCs\|dAs\|dAs\|dTs\|5mCs\|dTs\|dGs\|dAs\|dGs\|5mCs\|5mCs\|dAp\|dTs\|oGs\|oAs\|oTs\|oGs\|oG] |
| 4111 | [oGs\|oAs\|oGs\|o5mCs\|o5mCs\|dAs\|dAs\|dTs\|5mCs\|dTs\|dGs\|dAs\|dGs\|5mCs\|5mCs\|dAp\|dTp\|oGs\|oAs\|oTs\|oGs\|oG] |
| 4112 | [oGs\|oAs\|oGp\|o5mCs\|o5mCs\|dAs\|dAs\|dTs\|5mCs\|dTs\|dGs\|dAs\|dGs\|5mCs\|5mCs\|dAs\|dTp\|oGs\|oAs\|oTs\|oGs\|oG] |
| 4113 | [oGs\|oAs\|oGp\|o5mCs\|o5mCs\|dAs\|dAs\|dTs\|5mCs\|dTs\|dGs\|dAs\|dGs\|5mCs\|5mCs\|dAp\|dTs\|oGs\|oAs\|oTs\|oGs\|oG] |
| 4114 | [oGs\|oAs\|oGs\|o5mCp\|o5mCs\|dAs\|dAs\|dTs\|5mCs\|dTs\|dGs\|dAs\|dGs\|5mCs\|5mCs\|dAs\|dTp\|oGs\|oAs\|oTs\|oGs\|oG] |
| 4115 | [oGs\|oAs\|oGs\|o5mCp\|o5mCs\|dAs\|dAs\|dTs\|5mCs\|dTs\|dGs\|dAs\|dGs\|5mCs\|5mCs\|dAp\|dTs\|oGs\|oAs\|oTs\|oGs\|oG] |
| 4116 | [oGs\|oAs\|oGp\|o5mCs\|o5mCs\|dAs\|dAs\|dTs\|5mCs\|dTs\|dGs\|dAs\|dGs\|5mCs\|5mCs\|dAp\|dTp\|oGs\|oAs\|oTs\|oGs\|oG] |
| 4117 | [oGs\|oAs\|oGs\|o5mCp\|o5mCs\|dAs\|dAs\|dTs\|5mCs\|dTs\|dGs\|dAs\|dGs\|5mCs\|5mCs\|dAp\|dTp\|oGs\|oAs\|oTs\|oGs\|oG] |
| 4118 | [oGs\|oAs\|oGp\|o5mCp\|o5mCs\|dAs\|dAs\|dTs\|5mCs\|dTs\|dGs\|dAs\|dGs\|5mCs\|5mCs\|dAs\|dTp\|oGs\|oAs\|oTs\|oGs\|oG] |
| 4119 | [oGs\|oAs\|oGp\|o5mCp\|o5mCs\|dAs\|dAs\|dTs\|5mCs\|dTs\|dGs\|dAs\|dGs\|5mCs\|5mCs\|dAp\|dTs\|oGs\|oAs\|oTs\|oGs\|oG] |
| 4120 | [oGs\|oAs\|oGp\|o5mCp\|o5mCs\|dAs\|dAs\|dTs\|5mCs\|dTs\|dGs\|dAs\|dGs\|5mCs\|5mCs\|dAp\|dTp\|oGs\|oAs\|oTs\|oGs\|oG] |
| 4121 | [oTs\|LAs\|oGs\|oGs\|oAs\|oGs\|o5mCs\|o5mCs\|dAs\|dAs\|dTs\|5mCs\|dTs\|dGs\|dAs\|dGs\|5mCs\|5mCs\|oAs\|oT] |
| 4122 | [oTs\|oAs\|LGs\|oGs\|oAs\|oGs\|o5mCs\|o5mCs\|dAs\|dAs\|dTs\|5mCs\|dTs\|dGs\|dAs\|dGs\|5mCs\|5mCs\|oAs\|oT] |
| 4123 | [oTs\|oAs\|oGs\|LGs\|oAs\|oGs\|o5mCs\|o5mCs\|dAs\|dAs\|dTs\|5mCs\|dTs\|dGs\|dAs\|dGs\|5mCs\|5mCs\|oAs\|oT] |
| 4124 | [oTs\|oAs\|oGs\|oGs\|LAs\|oGs\|o5mCs\|o5mCs\|dAs\|dAs\|dTs\|5mCs\|dTs\|dGs\|dAs\|dGs\|5mCs\|5mCs\|oAs\|oT] |
| 4125 | [oTs\|oAs\|oGs\|oGs\|oAs\|LGs\|o5mCs\|o5mCs\|dAs\|dAs\|dTs\|5mCs\|dTs\|dGs\|dAs\|dGs\|5mCs\|5mCs\|oAs\|oT] |
| 4126 | [oTs\|oAs\|oGs\|oGs\|oAs\|oGs\|L5mCs\|o5mCs\|dAs\|dAs\|dTs\|5mCs\|dTs\|dGs\|dAs\|dGs\|5mCs\|5mCs\|oAs\|oT] |
| 4127 | [oTs\|oAs\|dGs\|dGs\|dAs\|dGs\|5mCs\|5mCs\|dAs\|dAs\|dTs\|5mCs\|oTs\|oGs\|oAs\|oGs\|o5mCs\|o5mCs\|LAs\|oT] |
| 4128 | [oTs\|oAs\|dGs\|dGs\|dAs\|dGs\|5mCs\|5mCs\|dAs\|dAs\|dTs\|5mCs\|oTs\|oGs\|oAs\|oGs\|o5mCs\|L5mCs\|oAs\|oT] |
| 4129 | [oTs\|oAs\|dGs\|dGs\|dAs\|dGs\|5mCs\|5mCs\|dAs\|dAs\|dTs\|5mCs\|oTs\|oGs\|oAs\|oGs\|L5mCs\|o5mCs\|oAs\|oT] |
| 4130 | [oTs\|oAs\|dGs\|dGs\|dAs\|dGs\|5mCs\|5mCs\|dAs\|dAs\|dTs\|5mCs\|oTs\|oGs\|oAs\|LGs\|o5mCs\|o5mCs\|oAs\|oT] |
| 4131 | [oTs\|oAs\|dGs\|dGs\|dAs\|dGs\|5mCs\|5mCs\|dAs\|dAs\|dTs\|5mCs\|oTs\|oGs\|LAs\|oGs\|o5mCs\|o5mCs\|oAs\|oT] |
| 4132 | [oTs\|oAs\|dGs\|dGs\|dAs\|dGs\|5mCs\|5mCs\|dAs\|dAs\|dTs\|5mCs\|oTs\|LGs\|oAs\|oGs\|o5mCs\|o5mCs\|oAs\|oT] |
| 4133 | [oTs\|LAs\|oGs\|oGs\|oAs\|oGs\|o5mCs\|5mCs\|dAs\|dAs\|dTs\|5mCs\|dTs\|dGs\|dAs\|dGs\|5mCs\|o5mCs\|oAs\|oT] |
| 4134 | [oTs\|oAs\|LGs\|oGs\|oAs\|oGs\|o5mCs\|5mCs\|dAs\|dAs\|dTs\|5mCs\|dTs\|dGs\|dAs\|dGs\|5mCs\|o5mCs\|oAs\|oT] |
| 4135 | [oTs\|oAs\|oGs\|LGs\|oAs\|oGs\|o5mCs\|5mCs\|dAs\|dAs\|dTs\|5mCs\|dTs\|dGs\|dAs\|dGs\|5mCs\|o5mCs\|oAs\|oT] |
| 4136 | [oTs\|oAs\|oGs\|oGs\|LAs\|oGs\|o5mCs\|5mCs\|dAs\|dAs\|dTs\|5mCs\|dTs\|dGs\|dAs\|dGs\|5mCs\|o5mCs\|oAs\|oT] |
| 4137 | [oTs\|oAs\|oGs\|oGs\|oAs\|LGs\|o5mCs\|5mCs\|dAs\|dAs\|dTs\|5mCs\|dTs\|dGs\|dAs\|dGs\|5mCs\|o5mCs\|oAs\|oT] |
| 4138 | [oTs\|oAs\|oGs\|dGs\|dAs\|dGs\|5mCs\|5mCs\|dAs\|dAs\|dTs\|5mCs\|dTs\|oGs\|oAs\|oGs\|o5mCs\|o5mCs\|LAs\|oT] |
| 4139 | [oTs\|oAs\|oGs\|dGs\|dAs\|dGs\|5mCs\|5mCs\|dAs\|dAs\|dTs\|5mCs\|dTs\|oGs\|oAs\|oGs\|o5mCs\|L5mCs\|oAs\|oT] |
| 4140 | [oTs\|oAs\|oGs\|dGs\|dAs\|dGs\|5mCs\|5mCs\|dAs\|dAs\|dTs\|5mCs\|dTs\|oGs\|oAs\|oGs\|L5mCs\|o5mCs\|oAs\|oT] |
| 4141 | [oTs\|oAs\|oGs\|dGs\|dAs\|dGs\|5mCs\|5mCs\|dAs\|dAs\|dTs\|5mCs\|dTs\|oGs\|oAs\|LGs\|o5mCs\|o5mCs\|oAs\|oT] |
| 4142 | [oTs\|oAs\|oGs\|dGs\|dAs\|dGs\|5mCs\|5mCs\|dAs\|dAs\|dTs\|5mCs\|dTs\|oGs\|LAs\|oGs\|o5mCs\|o5mCs\|oAs\|oT] |
| 4143 | [oTs\|LAs\|oGs\|oGs\|oAs\|oGs\|o5mCs\|5mCs\|dAs\|dAs\|dTs\|5mCs\|dTs\|dGs\|dAs\|dGs\|5mCs\|o5mCs\|oA] |
| 4144 | [oTs\|oAs\|LGs\|oGs\|oAs\|oGs\|o5mCs\|5mCs\|dAs\|dAs\|dTs\|5mCs\|dTs\|dGs\|dAs\|dGs\|5mCs\|o5mCs\|oA] |
| 4145 | [oTs\|oAs\|oGs\|LGs\|oAs\|oGs\|o5mCs\|5mCs\|dAs\|dAs\|dTs\|5mCs\|dTs\|dGs\|dAs\|dGs\|5mCs\|o5mCs\|oA] |
| 4146 | [oTs\|oAs\|oGs\|oGs\|LAs\|oGs\|o5mCs\|5mCs\|dAs\|dAs\|dTs\|5mCs\|dTs\|dGs\|dAs\|dGs\|5mCs\|o5mCs\|oA] |
| 4147 | [oTs\|oAs\|oGs\|oGs\|oAs\|LGs\|o5mCs\|5mCs\|dAs\|dAs\|dTs\|5mCs\|dTs\|dGs\|dAs\|dGs\|5mCs\|o5mCs\|oA] |
| 4148 | [oAs\|oGs\|dGs\|dAs\|dGs\|5mCs\|5mCs\|dAs\|dAs\|dTs\|5mCs\|dTs\|oGs\|oAs\|oGs\|o5mCs\|o5mCs\|LAs\|oT] |
| 4149 | [oAs\|oGs\|dGs\|dAs\|dGs\|5mCs\|5mCs\|dAs\|dAs\|dTs\|5mCs\|dTs\|oGs\|oAs\|oGs\|o5mCs\|L5mCs\|oAs\|oT] |
| 4150 | [oAs\|oGs\|dGs\|dAs\|dGs\|5mCs\|5mCs\|dAs\|dAs\|dTs\|5mCs\|dTs\|oGs\|oAs\|oGs\|L5mCs\|o5mCs\|oAs\|oT] |
| 4151 | [oAs\|oGs\|dGs\|dAs\|dGs\|5mCs\|5mCs\|dAs\|dAs\|dTs\|5mCs\|dTs\|oGs\|oAs\|LGs\|o5mCs\|o5mCs\|oAs\|oT] |
| 4152 | [oAs\|oGs\|dGs\|dAs\|dGs\|5mCs\|5mCs\|dAs\|dAs\|dTs\|5mCs\|dTs\|oGs\|LAs\|oGs\|o5mCs\|o5mCs\|oAs\|oT] |
| 4153 | [oTs\|LAs\|oGs\|oGs\|oAs\|oGs\|5mCs\|5mCs\|dAs\|dAs\|dTs\|5mCs\|dTs\|dGs\|dAs\|dGs\|o5mCs\|o5mCs\|oAs\|oT] |
| 4154 | [oTs\|oAs\|LGs\|oGs\|oAs\|oGs\|5mCs\|5mCs\|dAs\|dAs\|dTs\|5mCs\|dTs\|dGs\|dAs\|dGs\|o5mCs\|o5mCs\|oAs\|oT] |
| 4155 | [oTs\|oAs\|oGs\|LGs\|oAs\|oGs\|5mCs\|5mCs\|dAs\|dAs\|dTs\|5mCs\|dTs\|dGs\|dAs\|dGs\|o5mCs\|o5mCs\|oAs\|oT] |
| 4156 | [oTs\|oAs\|oGs\|oGs\|LAs\|oGs\|5mCs\|5mCs\|dAs\|dAs\|dTs\|5mCs\|dTs\|dGs\|dAs\|dGs\|o5mCs\|o5mCs\|oAs\|oT] |
| 4157 | [oTs\|oAs\|oGs\|oGs\|dAs\|dGs\|5mCs\|5mCs\|dAs\|dAs\|dTs\|5mCs\|dTs\|dGs\|oAs\|oGs\|o5mCs\|o5mCs\|LAs\|oT] |
| 4158 | [oTs\|oAs\|oGs\|oGs\|dAs\|dGs\|5mCs\|5mCs\|dAs\|dAs\|dTs\|5mCs\|dTs\|dGs\|oAs\|oGs\|o5mCs\|L5mCs\|oAs\|oT] |
| 4159 | [oTs\|oAs\|oGs\|oGs\|dAs\|dGs\|5mCs\|5mCs\|dAs\|dAs\|dTs\|5mCs\|dTs\|dGs\|oAs\|oGs\|L5mCs\|o5mCs\|oAs\|oT] |
| 4160 | [oTs\|oAs\|oGs\|oGs\|dAs\|dGs\|5mCs\|5mCs\|dAs\|dAs\|dTs\|5mCs\|dTs\|dGs\|oAs\|LGs\|o5mCs\|o5mCs\|oAs\|oT] |
| 4161 | [oTs\|LAs\|oGs\|oGs\|oAs\|oGs\|5mCs\|5mCs\|dAs\|dAs\|dTs\|5mCs\|dTs\|dGs\|dAs\|dGs\|o5mCs\|o5mCs\|oA] |
| 4162 | [oTs\|oAs\|LGs\|oGs\|oAs\|oGs\|5mCs\|5mCs\|dAs\|dAs\|dTs\|5mCs\|dTs\|dGs\|dAs\|dGs\|o5mCs\|o5mCs\|oA] |
| 4163 | [oTs\|oAs\|oGs\|LGs\|oAs\|oGs\|5mCs\|5mCs\|dAs\|dAs\|dTs\|5mCs\|dTs\|dGs\|dAs\|dGs\|o5mCs\|o5mCs\|oA] |
| 4164 | [oTs\|oAs\|oGs\|oGs\|LAs\|oGs\|5mCs\|5mCs\|dAs\|dAs\|dTs\|5mCs\|dTs\|dGs\|dAs\|dGs\|o5mCs\|o5mCs\|oA] |
| 4165 | [oTs\|oAs\|oGs\|dGs\|dAs\|dGs\|5mCs\|5mCs\|dAs\|dAs\|dTs\|5mCs\|dTs\|dGs\|oAs\|oGs\|o5mCs\|o5mCs\|LAs\|oT] |
| 4166 | [oTs\|oAs\|oGs\|dGs\|dAs\|dGs\|5mCs\|5mCs\|dAs\|dAs\|dTs\|5mCs\|dTs\|dGs\|oAs\|oGs\|o5mCs\|L5mCs\|oAs\|oT] |
| 4167 | [oTs\|oAs\|oGs\|dGs\|dAs\|dGs\|5mCs\|5mCs\|dAs\|dAs\|dTs\|5mCs\|dTs\|dGs\|oAs\|oGs\|L5mCs\|o5mCs\|oAs\|oT] |
| 4168 | [oTs\|LAs\|oGs\|oGs\|oAs\|oGs\|5mCs\|5mCs\|dAs\|dAs\|dTs\|5mCs\|dTs\|dGs\|dAs\|dGs\|o5mCs\|o5mC] |
| 4169 | [oTs\|oAs\|LGs\|oGs\|oAs\|oGs\|5mCs\|5mCs\|dAs\|dAs\|dTs\|5mCs\|dTs\|dGs\|dAs\|dGs\|o5mCs\|o5mC] |
| 4170 | [oTs\|oAs\|oGs\|LGs\|oAs\|oGs\|5mCs\|5mCs\|dAs\|dAs\|dTs\|5mCs\|dTs\|dGs\|dAs\|dGs\|o5mCs\|o5mC] |
| 4171 | [oTs\|oAs\|oGs\|oGs\|LAs\|oGs\|5mCs\|5mCs\|dAs\|dAs\|dTs\|5mCs\|dTs\|dGs\|dAs\|dGs\|o5mCs\|o5mC] |
| 4172 | [oGs\|oGs\|dAs\|dGs\|5mCs\|5mCs\|dAs\|dAs\|dTs\|5mCs\|dTs\|dGs\|oAs\|oGs\|o5mCs\|o5mCs\|LAs\|oT] |
| 4173 | [oGs\|oGs\|dAs\|dGs\|5mCs\|5mCs\|dAs\|dAs\|dTs\|5mCs\|dTs\|dGs\|oAs\|oGs\|o5mCs\|L5mCs\|oAs\|oT] |
| 4174 | [oGs\|oGs\|dAs\|dGs\|5mCs\|5mCs\|dAs\|dAs\|dTs\|5mCs\|dTs\|dGs\|oAs\|oGs\|L5mCs\|o5mCs\|oAs\|oT] |
| 4175 | [oGs\|oGs\|dAs\|dGs\|5mCs\|5mCs\|dAs\|dAs\|dTs\|5mCs\|dTs\|dGs\|oAs\|LGs\|o5mCs\|o5mCs\|oAs\|oT] |
| 4176 | [oTs\|LAs\|oGs\|oGs\|oAs\|dGs\|5mCs\|5mCs\|dAs\|dAs\|dTs\|5mCs\|dTs\|dGs\|dAs\|oGs\|o5mCs\|o5mCs\|oAs\|oT] |
| 4177 | [oTs\|oAs\|LGs\|oGs\|oAs\|dGs\|5mCs\|5mCs\|dAs\|dAs\|dTs\|5mCs\|dTs\|dGs\|dAs\|oGs\|o5mCs\|o5mCs\|oAs\|oT] |
| 4178 | [oTs\|oAs\|oGs\|LGs\|oAs\|dGs\|5mCs\|5mCs\|dAs\|dAs\|dTs\|5mCs\|dTs\|dGs\|dAs\|oGs\|o5mCs\|o5mCs\|oAs\|oT] |
| 4179 | [oTs\|oAs\|oGs\|oGs\|oAs\|dGs\|5mCs\|5mCs\|dAs\|dAs\|dTs\|5mCs\|dTs\|dGs\|dAs\|oGs\|o5mCs\|o5mCs\|LAs\|oT] |
| 4180 | [oTs\|oAs\|oGs\|oGs\|oAs\|dGs\|5mCs\|5mCs\|dAs\|dAs\|dTs\|5mCs\|dTs\|dGs\|dAs\|oGs\|o5mCs\|L5mCs\|oAs\|oT] |
| 4181 | [oTs\|oAs\|oGs\|oGs\|oAs\|dGs\|5mCs\|5mCs\|dAs\|dAs\|dTs\|5mCs\|dTs\|dGs\|dAs\|oGs\|L5mCs\|o5mCs\|oAs\|oT] |
| 4182 | [oTs\|LAs\|oGs\|oGs\|oAs\|dGs\|5mCs\|5mCs\|dAs\|dAs\|dTs\|5mCs\|dTs\|dGs\|dAs\|oGs\|o5mCs\|o5mCs\|oA] |
| 4183 | [oTs\|oAs\|LGs\|oGs\|oAs\|dGs\|5mCs\|5mCs\|dAs\|dAs\|dTs\|5mCs\|dTs\|dGs\|dAs\|oGs\|o5mCs\|o5mCs\|oA] |
| 4184 | [oTs\|oAs\|oGs\|LGs\|oAs\|dGs\|5mCs\|5mCs\|dAs\|dAs\|dTs\|5mCs\|dTs\|dGs\|dAs\|oGs\|o5mCs\|o5mCs\|oA] |
| 4185 | [oAs\|oGs\|oGs\|oAs\|dGs\|5mCs\|5mCs\|dAs\|dAs\|dTs\|5mCs\|dTs\|dGs\|dAs\|oGs\|o5mCs\|o5mCs\|LAs\|oT] |
| 4186 | [oAs\|oGs\|oGs\|oAs\|dGs\|5mCs\|5mCs\|dAs\|dAs\|dTs\|5mCs\|dTs\|dGs\|dAs\|oGs\|o5mCs\|L5mCs\|oAs\|oT] |
| 4187 | [oAs\|oGs\|oGs\|oAs\|dGs\|5mCs\|5mCs\|dAs\|dAs\|dTs\|5mCs\|dTs\|dGs\|dAs\|oGs\|L5mCs\|o5mCs\|oAs\|oT] |
| 4188 | [oTs\|LAs\|oGs\|oGs\|oAs\|dGs\|5mCs\|5mCs\|dAs\|dAs\|dTs\|5mCs\|dTs\|dGs\|dAs\|oGs\|o5mCs\|o5mC] |
| 4189 | [oTs\|oAs\|LGs\|oGs\|oAs\|dGs\|5mCs\|5mCs\|dAs\|dAs\|dTs\|5mCs\|dTs\|dGs\|dAs\|oGs\|o5mCs\|o5mC] |
| 4190 | [oTs\|oAs\|oGs\|LGs\|oAs\|dGs\|5mCs\|5mCs\|dAs\|dAs\|dTs\|5mCs\|dTs\|dGs\|dAs\|oGs\|o5mCs\|o5mC] |
| 4191 | [oGs\|oGs\|oAs\|dGs\|5mCs\|5mCs\|dAs\|dAs\|dTs\|5mCs\|dTs\|dGs\|dAs\|oGs\|o5mCs\|o5mCs\|LAs\|oT] |
| 4192 | [oGs\|oGs\|oAs\|dGs\|5mCs\|5mCs\|dAs\|dAs\|dTs\|5mCs\|dTs\|dGs\|dAs\|oGs\|o5mCs\|L5mCs\|oAs\|oT] |
| 4193 | [oGs\|oGs\|oAs\|dGs\|5mCs\|5mCs\|dAs\|dAs\|dTs\|5mCs\|dTs\|dGs\|dAs\|oGs\|L5mCs\|o5mCs\|oAs\|oT] |
| 4194 | [oTs\|LAs\|oGs\|oGs\|oAs\|dGs\|5mCs\|5mCs\|dAs\|dAs\|dTs\|5mCs\|dTs\|dGs\|dAs\|oGs\|o5mC] |
| 4195 | [oTs\|oAs\|LGs\|oGs\|oAs\|dGs\|5mCs\|5mCs\|dAs\|dAs\|dTs\|5mCs\|dTs\|dGs\|dAs\|oGs\|o5mC] |
| 4196 | [oTs\|oAs\|oGs\|LGs\|oAs\|dGs\|5mCs\|5mCs\|dAs\|dAs\|dTs\|5mCs\|dTs\|dGs\|dAs\|oGs\|o5mC] |
| 4197 | [oGs\|oAs\|dGs\|5mCs\|5mCs\|dAs\|dAs\|dTs\|5mCs\|dTs\|dGs\|dAs\|oGs\|o5mCs\|o5mCs\|LAs\|oT] |
| 4198 | [oGs\|oAs\|dGs\|5mCs\|5mCs\|dAs\|dAs\|dTs\|5mCs\|dTs\|dGs\|dAs\|oGs\|o5mCs\|L5mCs\|oAs\|oT] |
| 4199 | [oGs\|oAs\|dGs\|5mCs\|5mCs\|dAs\|dAs\|dTs\|5mCs\|dTs\|dGs\|dAs\|oGs\|L5mCs\|o5mCs\|oAs\|oT] |
| 4200 | [oAs\|LGs\|oGs\|oAs\|dGs\|5mCs\|5mCs\|dAs\|dAs\|dTs\|5mCs\|dTs\|dGs\|dAs\|oGs\|o5mCs\|o5mCs\|oAs\|oT] |
| 4201 | [oAs\|oGs\|LGs\|oAs\|dGs\|5mCs\|5mCs\|dAs\|dAs\|dTs\|5mCs\|dTs\|dGs\|dAs\|oGs\|o5mCs\|o5mCs\|oAs\|oT] |
| 4202 | [oTs\|oAs\|oGs\|oGs\|oAs\|dGs\|5mCs\|5mCs\|dAs\|dAs\|dTs\|5mCs\|dTs\|dGs\|dAs\|oGs\|o5mCs\|L5mCs\|oA] |
| 4203 | [oTs\|oAs\|oGs\|oGs\|oAs\|dGs\|5mCs\|5mCs\|dAs\|dAs\|dTs\|5mCs\|dTs\|dGs\|dAs\|oGs\|L5mCs\|o5mCs\|oA] |
| 4204 | [oAs\|LGs\|oGs\|oAs\|dGs\|5mCs\|5mCs\|dAs\|dAs\|dTs\|5mCs\|dTs\|dGs\|dAs\|oGs\|o5mCs\|o5mCs\|oA] |
| 4205 | [oAs\|oGs\|LGs\|oAs\|dGs\|5mCs\|5mCs\|dAs\|dAs\|dTs\|5mCs\|dTs\|dGs\|dAs\|oGs\|o5mCs\|o5mCs\|oA] |
| 4206 | [oAs\|oGs\|oGs\|oAs\|dGs\|5mCs\|5mCs\|dAs\|dAs\|dTs\|5mCs\|dTs\|dGs\|dAs\|oGs\|o5mCs\|L5mCs\|oA] |
| 4207 | [oAs\|oGs\|oGs\|oAs\|dGs\|5mCs\|5mCs\|dAs\|dAs\|dTs\|5mCs\|dTs\|dGs\|dAs\|oGs\|L5mCs\|5mCs\|oA] |
| 4208 | [oAs\|LGs\|oGs\|oAs\|dGs\|5mCs\|5mCs\|dAs\|dAs\|dTs\|5mCs\|dTs\|dGs\|dAs\|oGs\|o5mCs\|o5mC] |
| 4209 | [oAs\|oGs\|LGs\|oAs\|dGs\|5mCs\|5mCs\|dAs\|dAs\|dTs\|5mCs\|dTs\|dGs\|dAs\|oGs\|o5mCs\|o5mC] |
| 4210 | [oAs\|oGs\|oGs\|oAs\|dGs\|5mCs\|5mCs\|dAs\|dAs\|dTs\|5mCs\|dTs\|dGs\|dAs\|oGs\|L5mCs\|o5mC] |
| 4211 | [oTs\|oAs\|oGs\|oGs\|oAs\|oGs\|o5mCs\|o5mCs\|dAs\|dAs\|dTs\|5mCs\|dTs\|dGs\|dAs\|dGs\|5mCs\|5mCs\|oAs\|oT] |
| 4212 | [oTs\|oAs\|dGs\|dGs\|dAs\|dGs\|5mCs\|5mCs\|dAs\|dAs\|dTs\|5mCs\|oTs\|oGs\|oAs\|oGs\|o5mCs\|o5mCs\|oAs\|oT] |
| 4213 | [oTs\|oAs\|oGs\|oGs\|oAs\|oGs\|o5mCs\|5mCs\|dAs\|dAs\|dTs\|5mCs\|dTs\|dGs\|dAs\|dGs\|5mCs\|o5mCs\|oAs\|oT] |
| 4214 | [oTs\|oAs\|oGs\|dGs\|dAs\|dGs\|5mCs\|5mCs\|dAs\|dAs\|dTs\|5mCs\|dTs\|oGs\|oAs\|oGs\|o5mCs\|o5mCs\|oAs\|oT] |
| 4215 | [oTs\|oAs\|oGs\|oGs\|oAs\|oGs\|o5mCs\|5mCs\|dAs\|dAs\|dTs\|5mCs\|dTs\|dGs\|dAs\|dGs\|5mCs\|o5mCs\|oA] |
| 4216 | [oAs\|oGs\|dGs\|dAs\|dGs\|5mCs\|5mCs\|dAs\|dAs\|dTs\|5mCs\|dTs\|oGs\|oAs\|oGs\|o5mCs\|o5mCs\|oAs\|oT] |
| 4217 | [oTs\|oAs\|oGs\|oGs\|oAs\|oGs\|5mCs\|5mCs\|dAs\|dAs\|dTs\|5mCs\|dTs\|dGs\|dAs\|dGs\|o5mCs\|o5mCs\|oAs\|oT] |
| 4218 | [oTs\|oAs\|oGs\|oGs\|dAs\|dGs\|5mCs\|5mCs\|dAs\|dAs\|dTs\|5mCs\|dTs\|dGs\|oAs\|oGs\|o5mCs\|o5mCs\|oAs\|oT] |
| 4219 | [oTs\|oAs\|oGs\|oGs\|oAs\|oGs\|5mCs\|5mCs\|dAs\|dAs\|dTs\|5mCs\|dTs\|dGs\|dAs\|dGs\|o5mCs\|o5mCs\|oA] |
| 4220 | [oTs\|oAs\|oGs\|dGs\|dAs\|dGs\|5mCs\|5mCs\|dAs\|dAs\|dTs\|5mCs\|dTs\|dGs\|oAs\|oGs\|o5mCs\|o5mCs\|oAs\|oT] |
| 4221 | [oTs\|oAs\|oGs\|oGs\|oAs\|oGs\|5mCs\|5mCs\|dAs\|dAs\|dTs\|5mCs\|dTs\|dGs\|dAs\|dGs\|o5mCs\|o5mC] |
| 4222 | [oGs\|oGs\|dAs\|dGs\|5mCs\|5mCs\|dAs\|dAs\|dTs\|5mCs\|dTs\|dGs\|oAs\|oGs\|o5mCs\|o5mCs\|oAs\|oT] |
| 4223 | [oTs\|oAs\|oGs\|oGs\|oAs\|dGs\|5mCs\|5mCs\|dAs\|dAs\|dTs\|5mCs\|dTs\|dGs\|dAs\|oGs\|o5mCs\|o5mCs\|oAs\|oT] |
| 4224 | [oTs\|oAs\|oGs\|oGs\|oAs\|dGs\|5mCs\|5mCs\|dAs\|dAs\|dTs\|5mCs\|dTs\|dGs\|dAs\|oGs\|o5mCs\|o5mCs\|oA] |
| 4225 | [oTs\|oAs\|oGs\|oGs\|oAs\|dGs\|5mCs\|5mCs\|dAs\|dAs\|dTs\|5mCs\|dTs\|dGs\|dAs\|oGs\|o5mCs\|o5mC] |
| 4226 | [oGs\|oGs\|oAs\|dGs\|5mCs\|5mCs\|dAs\|dAs\|dTs\|5mCs\|dTs\|dGs\|dAs\|oGs\|o5mCs\|o5mCs\|oAs\|oT] |
| 4227 | [oTs\|oAs\|oGs\|oGs\|oAs\|dGs\|5mCs\|5mCs\|dAs\|dAs\|dTs\|5mCs\|dTs\|dGs\|dAs\|oGs\|o5mC] |
| 4228 | [oGs\|oAs\|dGs\|5mCs\|5mCs\|dAs\|dAs\|dTs\|5mCs\|dTs\|dGs\|dAs\|oGs\|o5mCs\|o5mCs\|oAs\|oT] |
| 4229 | [oAs\|oGs\|oGs\|oAs\|dGs\|5mCs\|5mCs\|dAs\|dAs\|dTs\|5mCs\|dTs\|dGs\|dAs\|oGs\|o5mCs\|o5mCs\|oAs\|oT] |
| 4230 | [oAs\|oGs\|oGs\|oAs\|dGs\|5mCs\|5mCs\|dAs\|dAs\|dTs\|5mCs\|dTs\|dGs\|dAs\|oGs\|o5mCs\|o5mCs\|oA] |
| 4231 | [oAs\|oGs\|oGs\|oAs\|dGs\|5mCs\|5mCs\|dAs\|dAs\|dTs\|5mCs\|dTs\|dGs\|dAs\|oGs\|o5mCs\|o5mC] |
| 4232 | [oTs\|oAs\|oGp\|oGs\|oAs\|dGs\|5mCs\|5mCs\|dAs\|dAs\|dTs\|5mCs\|dTs\|dGs\|dAs\|oGs\|o5mCs\|o5mCs\|oAs\|oT] |
| 4233 | [oTs\|oAs\|oGs\|oGp\|oAs\|dGs\|5mCs\|5mCs\|dAs\|dAs\|dTs\|5mCs\|dTs\|dGs\|dAs\|oGs\|o5mCs\|o5mCs\|oAs\|oT] |
| 4234 | [oTs\|oAs\|oGp\|oGp\|oAs\|dGs\|5mCs\|5mCs\|dAs\|dAs\|dTs\|5mCs\|dTs\|dGs\|dAs\|oGs\|o5mCs\|o5mCs\|oAs\|oT] |
| 4235 | [oTs\|oAs\|oGs\|oGs\|oAs\|dGs\|5mCs\|5mCs\|dAs\|dAs\|dTs\|5mCs\|dTs\|dGs\|dAs\|oGs\|o5mCp\|o5mCs\|oAs\|oT] |
| 4236 | [oTs\|oAs\|oGs\|oGs\|oAs\|dGs\|5mCs\|5mCs\|dAs\|dAs\|dTs\|5mCs\|dTs\|dGs\|dAs\|oGp\|o5mCs\|o5mCs\|oAs\|oT] |
| 4237 | [oTs\|oAs\|oGs\|oGs\|oAs\|dGs\|5mCs\|5mCs\|dAs\|dAs\|dTs\|5mCs\|dTs\|dGs\|dAs\|oGp\|o5mCp\|o5mCs\|oAs\|oT] |
| 4238 | [oTs\|oAs\|oGp\|oGs\|oAs\|dGs\|5mCs\|5mCs\|dAs\|dAs\|dTs\|5mCs\|dTs\|dGs\|dAs\|oGs\|o5mCp\|o5mCs\|oAs\|oT] |
| 4239 | [oTs\|oAs\|oGp\|oGs\|oAs\|dGs\|5mCs\|5mCs\|dAs\|dAs\|dTs\|5mCs\|dTs\|dGs\|dAs\|oGp\|o5mCs\|o5mCs\|oAs\|oT] |
| 4240 | [oTs\|oAs\|oGs\|oGp\|oAs\|dGs\|5mCs\|5mCs\|dAs\|dAs\|dTs\|5mCs\|dTs\|dGs\|dAs\|oGs\|o5mCp\|o5mCs\|oAs\|oT] |
| 4241 | [oTs\|oAs\|oGs\|oGp\|oAs\|dGs\|5mCs\|5mCs\|dAs\|dAs\|dTs\|5mCs\|dTs\|dGs\|dAs\|oGp\|o5mCs\|o5mCs\|oAs\|oT] |
| 4242 | [oTs\|oAs\|oGp\|oGs\|oAs\|dGs\|5mCs\|5mCs\|dAs\|dAs\|dTs\|5mCs\|dTs\|dGs\|dAs\|oGp\|o5mCp\|o5mCs\|oAs\|oT] |
| 4243 | [oTs\|oAs\|oGs\|oGp\|oAs\|dGs\|5mCs\|5mCs\|dAs\|dAs\|dTs\|5mCs\|dTs\|dGs\|dAs\|oGp\|o5mCp\|o5mCs\|oAs\|oT] |
| 4244 | [oTs\|oAs\|oGp\|oGp\|oAs\|dGs\|5mCs\|5mCs\|dAs\|dAs\|dTs\|5mCs\|dTs\|dGs\|dAs\|oGs\|o5mCp\|o5mCs\|oAs\|oT] |
| 4245 | [oTs\|oAs\|oGp\|oGp\|oAs\|dGs\|5mCs\|5mCs\|dAs\|dAs\|dTs\|5mCs\|dTs\|dGs\|dAs\|oGp\|o5mCs\|o5mCs\|oAs\|oT] |
| 4246 | [oTs\|oAs\|oGp\|oGp\|oAs\|dGs\|5mCs\|5mCs\|dAs\|dAs\|dTs\|5mCs\|dTs\|dGs\|dAs\|oGp\|o5mCp\|o5mCs\|oAs\|oT] |
| 4247 | [oTs\|oAs\|oGs\|oGs\|oAs\|dGs\|5mCs\|5mCs\|dAs\|dAs\|dTs\|5mCs\|dTs\|dGs\|dAs\|oGs\|o5mCs\|o5mCs\|oAs\|oTs\|oG] |
| 4248 | [oTs\|oAs\|oGp\|oGs\|oAs\|dGs\|5mCs\|5mCs\|dAs\|dAs\|dTs\|5mCs\|dTs\|dGs\|dAs\|oGs\|o5mCs\|o5mCs\|oAs\|oTs\|oG] |
| 4249 | [oTs\|oAs\|oGs\|oGp\|oAs\|dGs\|5mCs\|5mCs\|dAs\|dAs\|dTs\|5mCs\|dTs\|dGs\|dAs\|oGs\|o5mCs\|o5mCs\|oAs\|oTs\|oG] |
| 4250 | [oTs\|oAs\|oGp\|oGp\|oAs\|dGs\|5mCs\|5mCs\|dAs\|dAs\|dTs\|5mCs\|dTs\|dGs\|dAs\|oGs\|o5mCs\|o5mCs\|oAs\|oTs\|oG] |
| 4251 | [oTs\|oAs\|oGs\|oGs\|oAs\|dGs\|5mCs\|5mCs\|dAs\|dAs\|dTs\|5mCs\|dTs\|dGs\|dAs\|oGs\|o5mCp\|o5mCs\|oAs\|oTs\|oG] |
| 4252 | [oTs\|oAs\|oGs\|oGs\|oAs\|dGs\|5mCs\|5mCs\|dAs\|dAs\|dTs\|5mCs\|dTs\|dGs\|dAs\|oGp\|o5mCs\|o5mCs\|oAs\|oTs\|oG] |
| 4253 | [oTs\|oAs\|oGs\|oGs\|oAs\|dGs\|5mCs\|5mCs\|dAs\|dAs\|dTs\|5mCs\|dTs\|dGs\|dAs\|oGp\|o5mCp\|o5mCs\|oAs\|oTs\|oG] |
| 4254 | [oTs\|oAs\|oGp\|oGs\|oAs\|dGs\|5mCs\|5mCs\|dAs\|dAs\|dTs\|5mCs\|dTs\|dGs\|dAs\|oGs\|o5mCp\|o5mCs\|oAs\|oTs\|oG] |
| 4255 | [oTs\|oAs\|oGp\|oGs\|oAs\|dGs\|5mCs\|5mCs\|dAs\|dAs\|dTs\|5mCs\|dTs\|dGs\|dAs\|oGp\|o5mCs\|o5mCs\|oAs\|oTs\|oG] |
| 4256 | [oTs\|oAs\|oGs\|oGp\|oAs\|dGs\|5mCs\|5mCs\|dAs\|dAs\|dTs\|5mCs\|dTs\|dGs\|dAs\|oGs\|o5mCp\|o5mCs\|oAs\|oTs\|oG] |
| 4257 | [oTs\|oAs\|oGs\|oGp\|oAs\|dGs\|5mCs\|5mCs\|dAs\|dAs\|dTs\|5mCs\|dTs\|dGs\|dAs\|oGp\|o5mCs\|o5mCs\|oAs\|oTs\|oG] |
| 4258 | [oTs\|oAs\|oGp\|oGs\|oAs\|dGs\|5mCs\|5mCs\|dAs\|dAs\|dTs\|5mCs\|dTs\|dGs\|dAs\|oGp\|o5mCp\|o5mCs\|oAs\|oTs\|oG] |
| 4259 | [oTs\|oAs\|oGs\|oGp\|oAs\|dGs\|5mCs\|5mCs\|dAs\|dAs\|dTs\|5mCs\|dTs\|dGs\|dAs\|oGp\|o5mCp\|o5mCs\|oAs\|oTs\|oG] |
| 4260 | [oTs\|oAs\|oGp\|oGp\|oAs\|dGs\|5mCs\|5mCs\|dAs\|dAs\|dTs\|5mCs\|dTs\|dGs\|dAs\|oGs\|o5mCp\|o5mCs\|oAs\|oTs\|oG] |
| 4261 | [oTs\|oAs\|oGp\|oGp\|oAs\|dGs\|5mCs\|5mCs\|dAs\|dAs\|dTs\|5mCs\|dTs\|dGs\|dAs\|oGp\|o5mCs\|o5mCs\|oAs\|oTs\|oG] |
| 4262 | [oTs\|oAs\|oGp\|oGp\|oAs\|dGs\|5mCs\|5mCs\|dAs\|dAs\|dTs\|5mCs\|dTs\|dGs\|dAs\|oGp\|o5mCp\|o5mCs\|oAs\|oTs\|oG] |
| 4263 | [oTs\|oAs\|oGs\|oGs\|oAs\|dGs\|5mCs\|5mCs\|dAs\|dAs\|dTs\|5mCs\|dTs\|dGs\|dAs\|oGs\|o5mCs\|o5mCs\|oAs\|oTs\|oGs\|oA] |
| 4264 | [oTs\|oAs\|oGp\|oGs\|oAs\|dGs\|5mCs\|5mCs\|dAs\|dAs\|dTs\|5mCs\|dTs\|dGs\|dAs\|oGs\|o5mCs\|o5mCs\|oAs\|oTs\|oGs\|oA] |
| 4265 | [oTs\|oAs\|oGs\|oGp\|oAs\|dGs\|5mCs\|5mCs\|dAs\|dAs\|dTs\|5mCs\|dTs\|dGs\|dAs\|oGs\|o5mCs\|o5mCs\|oAs\|oTs\|oGs\|oA] |
| 4266 | [oTs\|oAs\|oGp\|oGp\|oAs\|dGs\|5mCs\|5mCs\|dAs\|dAs\|dTs\|5mCs\|dTs\|dGs\|dAs\|oGs\|o5mCs\|o5mCs\|oAs\|oTs\|oGs\|oA] |
| 4267 | [oTs\|oAs\|oGs\|oGs\|oAs\|dGs\|5mCs\|5mCs\|dAs\|dAs\|dTs\|5mCs\|dTs\|dGs\|dAs\|oGs\|o5mCp\|o5mCs\|oAs\|oTs\|oGs\|oA] |
| 4268 | [oTs\|oAs\|oGs\|oGs\|oAs\|dGs\|5mCs\|5mCs\|dAs\|dAs\|dTs\|5mCs\|dTs\|dGs\|dAs\|oGp\|o5mCs\|o5mCs\|oAs\|oTs\|oGs\|oA] |
| 4269 | [oTs\|oAs\|oGs\|oGs\|oAs\|dGs\|5mCs\|5mCs\|dAs\|dAs\|dTs\|5mCs\|dTs\|dGs\|dAs\|oGp\|o5mCp\|o5mCs\|oAs\|oTs\|oGs\|oA] |
| 4270 | [oTs\|oAs\|oGp\|oGs\|oAs\|dGs\|5mCs\|5mCs\|dAs\|dAs\|dTs\|5mCs\|dTs\|dGs\|dAs\|oGs\|o5mCp\|o5mCs\|oAs\|oTs\|oGs\|oA] |
| 4271 | [oTs\|oAs\|oGp\|oGs\|oAs\|dGs\|5mCs\|5mCs\|dAs\|dAs\|dTs\|5mCs\|dTs\|dGs\|dAs\|oGp\|o5mCs\|o5mCs\|oAs\|oTs\|oGs\|oA] |
| 4272 | [oTs\|oAs\|oGs\|oGp\|oAs\|dGs\|5mCs\|5mCs\|dAs\|dAs\|dTs\|5mCs\|dTs\|dGs\|dAs\|oGs\|o5mCp\|o5mCs\|oAs\|oTs\|oGs\|oA] |
| 4273 | [oTs\|oAs\|oGs\|oGp\|oAs\|dGs\|5mCs\|5mCs\|dAs\|dAs\|dTs\|5mCs\|dTs\|dGs\|dAs\|oGp\|o5mCs\|o5mCs\|oAs\|oTs\|oGs\|oA] |
| 4274 | [oTs\|oAs\|oGp\|oGs\|oAs\|dGs\|5mCs\|5mCs\|dAs\|dAs\|dTs\|5mCs\|dTs\|dGs\|dAs\|oGp\|o5mCp\|o5mCs\|oAs\|oTs\|oGs\|oA] |
| 4275 | [oTs\|oAs\|oGs\|oGp\|oAs\|dGs\|5mCs\|5mCs\|dAs\|dAs\|dTs\|5mCs\|dTs\|dGs\|dAs\|oGp\|o5mCp\|o5mCs\|oAs\|oTs\|oGs\|oA] |
| 4276 | [oTs\|oAs\|oGp\|oGp\|oAs\|dGs\|5mCs\|5mCs\|dAs\|dAs\|dTs\|5mCs\|dTs\|dGs\|dAs\|oGs\|o5mCp\|o5mCs\|oAs\|oTs\|oGs\|oA] |
| 4277 | [oTs\|oAs\|oGp\|oGp\|oAs\|dGs\|5mCs\|5mCs\|dAs\|dAs\|dTs\|5mCs\|dTs\|dGs\|dAs\|oGp\|o5mCs\|o5mCs\|oAs\|oTs\|oGs\|oA] |
| 4278 | [oTs\|oAs\|oGp\|oGp\|oAs\|dGs\|5mCs\|5mCs\|dAs\|dAs\|dTs\|5mCs\|dTs\|dGs\|dAs\|oGp\|o5mCp\|o5mCs\|oAs\|oTs\|oGs\|oA] |
| 4279 | [oTs\|oAs\|oGs\|oGs\|oAs\|dGs\|5mCs\|5mCs\|dAs\|dAs\|dTs\|5mCs\|dTs\|dGs\|dAs\|oGs\|o5mCs\|o5mCs\|oAs\|oTs\|oGs\|oAs\|oT] |
| 4280 | [oTs\|oAs\|oGp\|oGs\|oAs\|dGs\|5mCs\|5mCs\|dAs\|dAs\|dTs\|5mCs\|dTs\|dGs\|dAs\|oGs\|o5mCs\|o5mCs\|oAs\|oTs\|oGs\|oAs\|oT] |
| 4281 | [oTs\|oAs\|oGs\|oGp\|oAs\|dGs\|5mCs\|5mCs\|dAs\|dAs\|dTs\|5mCs\|dTs\|dGs\|dAs\|oGs\|o5mCs\|o5mCs\|oAs\|oTs\|oGs\|oAs\|oT] |
| 4282 | [oTs\|oAs\|oGp\|oGp\|oAs\|dGs\|5mCs\|5mCs\|dAs\|dAs\|dTs\|5mCs\|dTs\|dGs\|dAs\|oGs\|o5mCs\|o5mCs\|oAs\|oTs\|oGs\|oAs\|oT] |
| 4283 | [oTs\|oAs\|oGs\|oGs\|oAs\|dGs\|5mCs\|5mCs\|dAs\|dAs\|dTs\|5mCs\|dTs\|dGs\|dAs\|oGs\|o5mCp\|o5mCs\|oAs\|oTs\|oGs\|oAs\|oT] |
| 4284 | [oTs\|oAs\|oGs\|oGs\|oAs\|dGs\|5mCs\|5mCs\|dAs\|dAs\|dTs\|5mCs\|dTs\|dGs\|dAs\|oGp\|o5mCs\|o5mCs\|oAs\|oTs\|oGs\|oAs\|oT] |
| 4285 | [oTs\|oAs\|oGs\|oGs\|oAs\|dGs\|5mCs\|5mCs\|dAs\|dAs\|dTs\|5mCs\|dTs\|dGs\|dAs\|oGp\|o5mCp\|o5mCs\|oAs\|oTs\|oGs\|oAs\|oT] |
| 4286 | [oTs\|oAs\|oGp\|oGs\|oAs\|dGs\|5mCs\|5mCs\|dAs\|dAs\|dTs\|5mCs\|dTs\|dGs\|dAs\|oGs\|o5mCp\|o5mCs\|oAs\|oTs\|oGs\|oAs\|oT] |
| 4287 | [oTs\|oAs\|oGp\|oGs\|oAs\|dGs\|5mCs\|5mCs\|dAs\|dAs\|dTs\|5mCs\|dTs\|dGs\|dAs\|oGp\|o5mCs\|o5mCs\|oAs\|oTs\|oGs\|oAs\|oT] |
| 4288 | [oTs\|oAs\|oGs\|oGp\|oAs\|dGs\|5mCs\|5mCs\|dAs\|dAs\|dTs\|5mCs\|dTs\|dGs\|dAs\|oGs\|o5mCp\|o5mCs\|oAs\|oTs\|oGs\|oAs\|oT] |
| 4289 | [oTs\|oAs\|oGs\|oGp\|oAs\|dGs\|5mCs\|5mCs\|dAs\|dAs\|dTs\|5mCs\|dTs\|dGs\|dAs\|oGp\|o5mCs\|o5mCs\|oAs\|oTs\|oGs\|oAs\|oT] |
| 4290 | [oTs\|oAs\|oGp\|oGs\|oAs\|dGs\|5mCs\|5mCs\|dAs\|dAs\|dTs\|5mCs\|dTs\|dGs\|dAs\|oGp\|o5mCp\|o5mCs\|oAs\|oTs\|oGs\|oAs\|oT] |
| 4291 | [oTs\|oAs\|oGs\|oGp\|oAs\|dGs\|5mCs\|5mCs\|dAs\|dAs\|dTs\|5mCs\|dTs\|dGs\|dAs\|oGp\|o5mCp\|o5mCs\|oAs\|oTs\|oGs\|oAs\|oT] |
| 4292 | [oTs\|oAs\|oGp\|oGp\|oAs\|dGs\|5mCs\|5mCs\|dAs\|dAs\|dTs\|5mCs\|dTs\|dGs\|dAs\|oGs\|o5mCp\|o5mCs\|oAs\|oTs\|oGs\|oAs\|oT] |
| 4293 | [oTs\|oAs\|oGp\|oGp\|oAs\|dGs\|5mCs\|5mCs\|dAs\|dAs\|dTs\|5mCs\|dTs\|dGs\|dAs\|oGp\|o5mCs\|o5mCs\|oAs\|oTs\|oGs\|oAs\|oT] |
| 4294 | [oTs\|oAs\|oGp\|oGp\|oAs\|dGs\|5mCs\|5mCs\|dAs\|dAs\|dTs\|5mCs\|dTs\|dGs\|dAs\|oGp\|o5mCp\|o5mCs\|oAs\|oTs\|oGs\|oAs\|oT] |
| 4295 | [oTs\|oAs\|oGs\|oGs\|oAs\|dGs\|5mCs\|5mCs\|dAs\|dAs\|dTs\|5mCs\|dTs\|dGs\|dAs\|dGs\|o5mCs\|o5mCs\|oAs\|oTs\|oG] |
| 4296 | [oTs\|oAs\|oGp\|oGs\|oAs\|dGs\|5mCs\|5mCs\|dAs\|dAs\|dTs\|5mCs\|dTs\|dGs\|dAs\|dGs\|o5mCs\|o5mCs\|oAs\|oTs\|oG] |
| 4297 | [oTs\|oAs\|oGs\|oGp\|oAs\|dGs\|5mCs\|5mCs\|dAs\|dAs\|dTs\|5mCs\|dTs\|dGs\|dAs\|dGs\|o5mCs\|o5mCs\|oAs\|oTs\|oG] |
| 4298 | [oTs\|oAs\|oGp\|oGp\|oAs\|dGs\|5mCs\|5mCs\|dAs\|dAs\|dTs\|5mCs\|dTs\|dGs\|dAs\|dGs\|o5mCs\|o5mCs\|oAs\|oTs\|oG] |
| 4299 | [oTs\|oAs\|oGs\|oGs\|oAs\|dGs\|5mCs\|5mCs\|dAs\|dAs\|dTs\|5mCs\|dTs\|dGs\|dAs\|dGs\|o5mCp\|o5mCs\|oAs\|oTs\|oG] |
| 4300 | [oTs\|oAs\|oGs\|oGs\|oAs\|dGs\|5mCs\|5mCs\|dAs\|dAs\|dTs\|5mCs\|dTs\|dGs\|dAs\|dGp\|o5mCs\|o5mCs\|oAs\|oTs\|oG] |
| 4301 | [oTs\|oAs\|oGs\|oGs\|oAs\|dGs\|5mCs\|5mCs\|dAs\|dAs\|dTs\|5mCs\|dTs\|dGs\|dAs\|dGp\|o5mCp\|o5mCs\|oAs\|oTs\|oG] |
| 4302 | [oTs\|oAs\|oGp\|oGs\|oAs\|dGs\|5mCs\|5mCs\|dAs\|dAs\|dTs\|5mCs\|dTs\|dGs\|dAs\|dGs\|o5mCp\|o5mCs\|oAs\|oTs\|oG] |
| 4303 | [oTs\|oAs\|oGp\|oGs\|oAs\|dGs\|5mCs\|5mCs\|dAs\|dAs\|dTs\|5mCs\|dTs\|dGs\|dAs\|dGp\|o5mCs\|o5mCs\|oAs\|oTs\|oG] |
| 4304 | [oTs\|oAs\|oGs\|oGp\|oAs\|dGs\|5mCs\|5mCs\|dAs\|dAs\|dTs\|5mCs\|dTs\|dGs\|dAs\|dGs\|o5mCp\|o5mCs\|oAs\|oTs\|oG] |
| 4305 | [oTs\|oAs\|oGs\|oGp\|oAs\|dGs\|5mCs\|5mCs\|dAs\|dAs\|dTs\|5mCs\|dTs\|dGs\|dAs\|dGp\|o5mCs\|o5mCs\|oAs\|oTs\|oG] |
| 4306 | [oTs\|oAs\|oGp\|oGs\|oAs\|dGs\|5mCs\|5mCs\|dAs\|dAs\|dTs\|5mCs\|dTs\|dGs\|dAs\|dGp\|o5mCp\|o5mCs\|oAs\|oTs\|oG] |
| 4307 | [oTs\|oAs\|oGs\|oGp\|oAs\|dGs\|5mCs\|5mCs\|dAs\|dAs\|dTs\|5mCs\|dTs\|dGs\|dAs\|dGp\|o5mCp\|o5mCs\|oAs\|oTs\|oG] |
| 4308 | [oTs\|oAs\|oGp\|oGp\|oAs\|dGs\|5mCs\|5mCs\|dAs\|dAs\|dTs\|5mCs\|dTs\|dGs\|dAs\|dGs\|o5mCp\|o5mCs\|oAs\|oTs\|oG] |
| 4309 | [oTs\|oAs\|oGp\|oGp\|oAs\|dGs\|5mCs\|5mCs\|dAs\|dAs\|dTs\|5mCs\|dTs\|dGs\|dAs\|dGp\|o5mCs\|o5mCs\|oAs\|oTs\|oG] |
| 4310 | [oTs\|oAs\|oGp\|oGp\|oAs\|dGs\|5mCs\|5mCs\|dAs\|dAs\|dTs\|5mCs\|dTs\|dGs\|dAs\|dGp\|o5mCp\|o5mCs\|oAs\|oTs\|oG] |
| 4311 | [oTs\|oAs\|oGs\|oGs\|oAs\|dGs\|5mCs\|5mCs\|dAs\|dAs\|dTs\|5mCs\|dTs\|dGs\|dAs\|dGs\|5mCs\|o5mCs\|oAs\|oTs\|oGs\|oA] |
| 4312 | [oTs\|oAs\|oGp\|oGs\|oAs\|dGs\|5mCs\|5mCs\|dAs\|dAs\|dTs\|5mCs\|dTs\|dGs\|dAs\|dGs\|5mCs\|o5mCs\|oAs\|oTs\|oGs\|oA] |
| 4313 | [oTs\|oAs\|oGs\|oGp\|oAs\|dGs\|5mCs\|5mCs\|dAs\|dAs\|dTs\|5mCs\|dTs\|dGs\|dAs\|dGs\|5mCs\|o5mCs\|oAs\|oTs\|oGs\|oA] |
| 4314 | [oTs\|oAs\|oGp\|oGp\|oAs\|dGs\|5mCs\|5mCs\|dAs\|dAs\|dTs\|5mCs\|dTs\|dGs\|dAs\|dGs\|5mCs\|o5mCs\|oAs\|oTs\|oGs\|oA] |
| 4315 | [oTs\|oAs\|oGs\|oGs\|oAs\|dGs\|5mCs\|5mCs\|dAs\|dAs\|dTs\|5mCs\|dTs\|dGs\|dAs\|dGs\|5mCp\|o5mCs\|oAs\|oTs\|oGs\|oA] |
| 4316 | [oTs\|oAs\|oGs\|oGs\|oAs\|dGs\|5mCs\|5mCs\|dAs\|dAs\|dTs\|5mCs\|dTs\|dGs\|dAs\|dGp\|5mCs\|o5mCs\|oAs\|oTs\|oGs\|oA] |
| 4317 | [oTs\|oAs\|oGs\|oGs\|oAs\|dGs\|5mCs\|5mCs\|dAs\|dAs\|dTs\|5mCs\|dTs\|dGs\|dAs\|dGp\|5mCp\|o5mCs\|oAs\|oTs\|oGs\|oA] |
| 4318 | [oTs\|oAs\|oGp\|oGs\|oAs\|dGs\|5mCs\|5mCs\|dAs\|dAs\|dTs\|5mCs\|dTs\|dGs\|dAs\|dGs\|5mCp\|o5mCs\|oAs\|oTs\|oGs\|oA] |
| 4319 | [oTs\|oAs\|oGp\|oGs\|oAs\|dGs\|5mCs\|5mCs\|dAs\|dAs\|dTs\|5mCs\|dTs\|dGs\|dAs\|dGp\|5mCs\|o5mCs\|oAs\|oTs\|oGs\|oA] |
| 4320 | [oTs\|oAs\|oGs\|oGp\|oAs\|dGs\|5mCs\|5mCs\|dAs\|dAs\|dTs\|5mCs\|dTs\|dGs\|dAs\|dGs\|5mCp\|o5mCs\|oAs\|oTs\|oGs\|oA] |
| 4321 | [oTs\|oAs\|oGs\|oGp\|oAs\|dGs\|5mCs\|5mCs\|dAs\|dAs\|dTs\|5mCs\|dTs\|dGs\|dAs\|dGp\|5mCs\|o5mCs\|oAs\|oTs\|oGs\|oA] |
| 4322 | [oTs\|oAs\|oGp\|oGs\|oAs\|dGs\|5mCs\|5mCs\|dAs\|dAs\|dTs\|5mCs\|dTs\|dGs\|dAs\|dGp\|5mCp\|o5mCs\|oAs\|oTs\|oGs\|oA] |
| 4323 | [oTs\|oAs\|oGs\|oGp\|oAs\|dGs\|5mCs\|5mCs\|dAs\|dAs\|dTs\|5mCs\|dTs\|dGs\|dAs\|dGp\|5mCp\|o5mCs\|oAs\|oTs\|oGs\|oA] |
| 4324 | [oTs\|oAs\|oGp\|oGp\|oAs\|dGs\|5mCs\|5mCs\|dAs\|dAs\|dTs\|5mCs\|dTs\|dGs\|dAs\|dGs\|5mCp\|o5mCs\|oAs\|oTs\|oGs\|oA] |
| 4325 | [oTs\|oAs\|oGp\|oGp\|oAs\|dGs\|5mCs\|5mCs\|dAs\|dAs\|dTs\|5mCs\|dTs\|dGs\|dAs\|dGp\|5mCs\|o5mCs\|oAs\|oTs\|oGs\|oA] |
| 4326 | [oTs\|oAs\|oGp\|oGp\|oAs\|dGs\|5mCs\|5mCs\|dAs\|dAs\|dTs\|5mCs\|dTs\|dGs\|dAs\|dGp\|5mCp\|o5mCs\|oAs\|oTs\|oGs\|oA] |
| 4327 | [oGs\|LTs\|o5mCs\|oGs\|o5mCs\|oTs\|oTs\|o5mCs\|dTs\|dTs\|5mCs\|dTs\|dGs\|5mCs\|dAs\|dGs\|dGs\|dAs\|oAs\|o5mC] |
| 4328 | [oGs\|oTs\|L5mCs\|oGs\|o5mCs\|oTs\|oTs\|o5mCs\|dTs\|dTs\|5mCs\|dTs\|dGs\|5mCs\|dAs\|dGs\|dGs\|dAs\|oAs\|o5mC] |
| 4329 | [oGs\|oTs\|o5mCs\|LGs\|o5mCs\|oTs\|oTs\|o5mCs\|dTs\|dTs\|5mCs\|dTs\|dGs\|5mCs\|dAs\|dGs\|dGs\|dAs\|oAs\|o5mC] |
| 4330 | [oGs\|oTs\|o5mCs\|oGs\|L5mCs\|oTs\|oTs\|o5mCs\|dTs\|dTs\|5mCs\|dTs\|dGs\|5mCs\|dAs\|dGs\|dGs\|dAs\|oAs\|o5mC] |
| 4331 | [oGs\|oTs\|o5mCs\|oGs\|o5mCs\|LTs\|oTs\|o5mCs\|dTs\|dTs\|5mCs\|dTs\|dGs\|5mCs\|dAs\|dGs\|dGs\|dAs\|oAs\|o5mC] |
| 4332 | [oGs\|oTs\|o5mCs\|oGs\|o5mCs\|oTs\|LTs\|o5mCs\|dTs\|dTs\|5mCs\|dTs\|dGs\|5mCs\|dAs\|dGs\|dGs\|dAs\|oAs\|o5mC] |
| 4333 | [oGs\|oTs\|5mCs\|dGs\|5mCs\|dTs\|dTs\|5mCs\|dTs\|dTs\|5mCs\|dTs\|oGs\|o5mCs\|oAs\|oGs\|oGs\|oAs\|LAs\|o5mC] |
| 4334 | [oGs\|oTs\|5mCs\|dGs\|5mCs\|dTs\|dTs\|5mCs\|dTs\|dTs\|5mCs\|dTs\|oGs\|o5mCs\|oAs\|oGs\|oGs\|LAs\|oAs\|o5mC] |
| 4335 | [oGs\|oTs\|5mCs\|dGs\|5mCs\|dTs\|dTs\|5mCs\|dTs\|dTs\|5mCs\|dTs\|oGs\|o5mCs\|oAs\|oGs\|LGs\|oAs\|oAs\|o5mC] |
| 4336 | [oGs\|oTs\|5mCs\|dGs\|5mCs\|dTs\|dTs\|5mCs\|dTs\|dTs\|5mCs\|dTs\|oGs\|o5mCs\|oAs\|LGs\|oGs\|oAs\|oAs\|o5mC] |
| 4337 | [oGs\|oTs\|5mCs\|dGs\|5mCs\|dTs\|dTs\|5mCs\|dTs\|dTs\|5mCs\|dTs\|oGs\|o5mCs\|LAs\|oGs\|oGs\|oAs\|oAs\|o5mC] |
| 4338 | [oGs\|oTs\|5mCs\|dGs\|5mCs\|dTs\|dTs\|5mCs\|dTs\|dTs\|5mCs\|dTs\|oGs\|L5mCs\|oAs\|oGs\|oGs\|oAs\|oAs\|o5mC] |
| 4339 | [oGs\|LTs\|o5mCs\|oGs\|o5mCs\|oTs\|oTs\|5mCs\|dTs\|dTs\|5mCs\|dTs\|dGs\|5mCs\|dAs\|dGs\|dGs\|oAs\|oAs\|o5mC] |
| 4340 | [oGs\|oTs\|L5mCs\|oGs\|o5mCs\|oTs\|oTs\|5mCs\|dTs\|dTs\|5mCs\|dTs\|dGs\|5mCs\|dAs\|dGs\|dGs\|oAs\|oAs\|o5mC] |
| 4341 | [oGs\|oTs\|o5mCs\|LGs\|o5mCs\|oTs\|oTs\|5mCs\|dTs\|dTs\|5mCs\|dTs\|dGs\|5mCs\|dAs\|dGs\|dGs\|oAs\|oAs\|o5mC] |
| 4342 | [oGs\|oTs\|o5mCs\|oGs\|L5mCs\|oTs\|oTs\|5mCs\|dTs\|dTs\|5mCs\|dTs\|dGs\|5mCs\|dAs\|dGs\|dGs\|oAs\|oAs\|o5mC] |
| 4343 | [oGs\|oTs\|o5mCs\|oGs\|o5mCs\|LTs\|oTs\|5mCs\|dTs\|dTs\|5mCs\|dTs\|dGs\|5mCs\|dAs\|dGs\|dGs\|oAs\|oAs\|o5mC] |
| 4344 | [oGs\|oTs\|o5mCs\|dGs\|5mCs\|dTs\|dTs\|5mCs\|dTs\|dTs\|5mCs\|dTs\|dGs\|o5mCs\|oAs\|oGs\|oGs\|oAs\|LAs\|o5mC] |
| 4345 | [oGs\|oTs\|o5mCs\|dGs\|5mCs\|dTs\|dTs\|5mCs\|dTs\|dTs\|5mCs\|dTs\|dGs\|o5mCs\|oAs\|oGs\|oGs\|LAs\|oAs\|o5mC] |
| 4346 | [oGs\|oTs\|o5mCs\|dGs\|5mCs\|dTs\|dTs\|5mCs\|dTs\|dTs\|5mCs\|dTs\|dGs\|o5mCs\|oAs\|oGs\|LGs\|oAs\|oAs\|o5mC] |
| 4347 | [oGs\|oTs\|o5mCs\|dGs\|5mCs\|dTs\|dTs\|5mCs\|dTs\|dTs\|5mCs\|dTs\|dGs\|o5mCs\|oAs\|LGs\|oGs\|oAs\|oAs\|o5mC] |
| 4348 | [oGs\|oTs\|o5mCs\|dGs\|5mCs\|dTs\|dTs\|5mCs\|dTs\|dTs\|5mCs\|dTs\|dGs\|o5mCs\|LAs\|oGs\|oGs\|oAs\|oAs\|o5mC] |
| 4349 | [oGs\|LTs\|o5mCs\|oGs\|o5mCs\|oTs\|oTs\|5mCs\|dTs\|dTs\|5mCs\|dTs\|dGs\|5mCs\|dAs\|dGs\|dGs\|oAs\|oA] |
| 4350 | [oGs\|oTs\|L5mCs\|oGs\|o5mCs\|oTs\|oTs\|5mCs\|dTs\|dTs\|5mCs\|dTs\|dGs\|5mCs\|dAs\|dGs\|dGs\|oAs\|oA] |
| 4351 | [oGs\|oTs\|o5mCs\|LGs\|o5mCs\|oTs\|oTs\|5mCs\|dTs\|dTs\|5mCs\|dTs\|dGs\|5mCs\|dAs\|dGs\|dGs\|oAs\|oA] |
| 4352 | [oGs\|oTs\|o5mCs\|oGs\|L5mCs\|oTs\|oTs\|5mCs\|dTs\|dTs\|5mCs\|dTs\|dGs\|5mCs\|dAs\|dGs\|dGs\|oAs\|oA] |
| 4353 | [oGs\|oTs\|o5mCs\|oGs\|o5mCs\|LTs\|oTs\|5mCs\|dTs\|dTs\|5mCs\|dTs\|dGs\|5mCs\|dAs\|dGs\|dGs\|oAs\|oA] |
| 4354 | [oTs\|o5mCs\|dGs\|5mCs\|dTs\|dTs\|5mCs\|dTs\|dTs\|5mCs\|dTs\|dGs\|o5mCs\|oAs\|oGs\|oGs\|oAs\|LAs\|o5mC] |
| 4355 | [oTs\|o5mCs\|dGs\|5mCs\|dTs\|dTs\|5mCs\|dTs\|dTs\|5mCs\|dTs\|dGs\|o5mCs\|oAs\|oGs\|oGs\|LAs\|oAs\|o5mC] |
| 4356 | [oTs\|o5mCs\|dGs\|5mCs\|dTs\|dTs\|5mCs\|dTs\|dTs\|5mCs\|dTs\|dGs\|o5mCs\|oAs\|oGs\|LGs\|oAs\|oAs\|o5mC] |
| 4357 | [oTs\|o5mCs\|dGs\|5mCs\|dTs\|dTs\|5mCs\|dTs\|dTs\|5mCs\|dTs\|dGs\|o5mCs\|oAs\|LGs\|oGs\|oAs\|oAs\|o5mC] |
| 4358 | [oTs\|o5mCs\|dGs\|5mCs\|dTs\|dTs\|5mCs\|dTs\|dTs\|5mCs\|dTs\|dGs\|o5mCs\|LAs\|oGs\|oGs\|oAs\|oAs\|o5mC] |
| 4359 | [oGs\|LTs\|o5mCs\|oGs\|o5mCs\|oTs\|dTs\|5mCs\|dTs\|dTs\|5mCs\|dTs\|dGs\|5mCs\|dAs\|dGs\|oGs\|oAs\|oAs\|o5mC] |
| 4360 | [oGs\|oTs\|L5mCs\|oGs\|o5mCs\|oTs\|dTs\|5mCs\|dTs\|dTs\|5mCs\|dTs\|dGs\|5mCs\|dAs\|dGs\|oGs\|oAs\|oAs\|o5mC] |
| 4361 | [oGs\|oTs\|o5mCs\|LGs\|o5mCs\|oTs\|dTs\|5mCs\|dTs\|dTs\|5mCs\|dTs\|dGs\|5mCs\|dAs\|dGs\|oGs\|oAs\|oAs\|o5mC] |
| 4362 | [oGs\|oTs\|o5mCs\|oGs\|L5mCs\|oTs\|dTs\|5mCs\|dTs\|dTs\|5mCs\|dTs\|dGs\|5mCs\|dAs\|dGs\|oGs\|oAs\|oAs\|o5mC] |
| 4363 | [oGs\|oTs\|o5mCs\|oGs\|5mCs\|dTs\|dTs\|5mCs\|dTs\|dTs\|5mCs\|dTs\|dGs\|5mCs\|oAs\|oGs\|oGs\|oAs\|LAs\|o5mC] |
| 4364 | [oGs\|oTs\|o5mCs\|oGs\|5mCs\|dTs\|dTs\|5mCs\|dTs\|dTs\|5mCs\|dTs\|dGs\|5mCs\|oAs\|oGs\|oGs\|LAs\|oAs\|o5mC] |
| 4365 | [oGs\|oTs\|o5mCs\|oGs\|5mCs\|dTs\|dTs\|5mCs\|dTs\|dTs\|5mCs\|dTs\|dGs\|5mCs\|oAs\|oGs\|LGs\|oAs\|oAs\|o5mC] |
| 4366 | [oGs\|oTs\|o5mCs\|oGs\|5mCs\|dTs\|dTs\|5mCs\|dTs\|dTs\|5mCs\|dTs\|dGs\|5mCs\|oAs\|LGs\|oGs\|oAs\|oAs\|o5mC] |
| 4367 | [oGs\|LTs\|o5mCs\|oGs\|o5mCs\|oTs\|dTs\|5mCs\|dTs\|dTs\|5mCs\|dTs\|dGs\|5mCs\|dAs\|dGs\|oGs\|oAs\|oA] |
| 4368 | [oGs\|oTs\|L5mCs\|oGs\|o5mCs\|oTs\|dTs\|5mCs\|dTs\|dTs\|5mCs\|dTs\|dGs\|5mCs\|dAs\|dGs\|oGs\|oAs\|oA] |
| 4369 | [oGs\|oTs\|o5mCs\|LGs\|o5mCs\|oTs\|dTs\|5mCs\|dTs\|dTs\|5mCs\|dTs\|dGs\|5mCs\|dAs\|dGs\|oGs\|oAs\|oA] |
| 4370 | [oGs\|oTs\|o5mCs\|oGs\|L5mCs\|oTs\|dTs\|5mCs\|dTs\|dTs\|5mCs\|dTs\|dGs\|5mCs\|dAs\|dGs\|oGs\|oAs\|oA] |
| 4371 | [oGs\|oTs\|o5mCs\|dGs\|5mCs\|dTs\|dTs\|5mCs\|dTs\|dTs\|5mCs\|dTs\|dGs\|5mCs\|oAs\|oGs\|oGs\|oAs\|LAs\|o5mC] |
| 4372 | [oGs\|oTs\|o5mCs\|dGs\|5mCs\|dTs\|dTs\|5mCs\|dTs\|dTs\|5mCs\|dTs\|dGs\|5mCs\|oAs\|oGs\|oGs\|LAs\|oAs\|o5mC] |
| 4373 | [oGs\|oTs\|o5mCs\|dGs\|5mCs\|dTs\|dTs\|5mCs\|dTs\|dTs\|5mCs\|dTs\|dGs\|5mCs\|oAs\|oGs\|LGs\|oAs\|oAs\|o5mC] |
| 4374 | [oGs\|LTs\|o5mCs\|oGs\|o5mCs\|oTs\|dTs\|5mCs\|dTs\|dTs\|5mCs\|dTs\|dGs\|5mCs\|dAs\|dGs\|oGs\|oA] |
| 4375 | [oGs\|oTs\|L5mCs\|oGs\|o5mCs\|oTs\|dTs\|5mCs\|dTs\|dTs\|5mCs\|dTs\|dGs\|5mCs\|dAs\|dGs\|oGs\|oA] |
| 4376 | [oGs\|oTs\|o5mCs\|LGs\|o5mCs\|oTs\|dTs\|5mCs\|dTs\|dTs\|5mCs\|dTs\|dGs\|5mCs\|dAs\|dGs\|oGs\|oA] |
| 4377 | [oGs\|oTs\|o5mCs\|oGs\|L5mCs\|oTs\|dTs\|5mCs\|dTs\|dTs\|5mCs\|dTs\|dGs\|5mCs\|dAs\|dGs\|oGs\|oA] |
| 4378 | [o5mCs\|oGs\|5mCs\|dTs\|dTs\|5mCs\|dTs\|dTs\|5mCs\|dTs\|dGs\|5mCs\|oAs\|oGs\|oGs\|oAs\|LAs\|o5mC] |
| 4379 | [o5mCs\|oGs\|5mCs\|dTs\|dTs\|5mCs\|dTs\|dTs\|5mCs\|dTs\|dGs\|5mCs\|oAs\|oGs\|oGs\|LAs\|oAs\|o5mC] |
| 4380 | [o5mCs\|oGs\|5mCs\|dTs\|dTs\|5mCs\|dTs\|dTs\|5mCs\|dTs\|dGs\|5mCs\|oAs\|oGs\|LGs\|oAs\|oAs\|o5mC] |
| 4381 | [o5mCs\|oGs\|5mCs\|dTs\|dTs\|5mCs\|dTs\|dTs\|5mCs\|dTs\|dGs\|5mCs\|oAs\|LGs\|oGs\|oAs\|oAs\|o5mC] |
| 4382 | [oGs\|LTs\|o5mCs\|oGs\|o5mCs\|dTs\|dTs\|5mCs\|dTs\|dTs\|5mCs\|dTs\|dGs\|5mCs\|dAs\|oGs\|oGs\|oAs\|oAs\|o5mC] |
| 4383 | [oGs\|oTs\|L5mCs\|oGs\|o5mCs\|dTs\|dTs\|5mCs\|dTs\|dTs\|5mCs\|dTs\|dGs\|5mCs\|dAs\|oGs\|oGs\|oAs\|oAs\|o5mC] |
| 4384 | [oGs\|oTs\|o5mCs\|LGs\|o5mCs\|dTs\|dTs\|5mCs\|dTs\|dTs\|5mCs\|dTs\|dGs\|5mCs\|dAs\|oGs\|oGs\|oAs\|oAs\|o5mC] |
| 4385 | [oGs\|oTs\|o5mCs\|oGs\|o5mCs\|dTs\|dTs\|5mCs\|dTs\|dTs\|5mCs\|dTs\|dGs\|5mCs\|dAs\|oGs\|oGs\|oAs\|LAs\|o5mC] |
| 4386 | [oGs\|oTs\|o5mCs\|oGs\|o5mCs\|dTs\|dTs\|5mCs\|dTs\|dTs\|5mCs\|dTs\|dGs\|5mCs\|dAs\|oGs\|oGs\|LAs\|oAs\|o5mC] |
| 4387 | [oGs\|oTs\|o5mCs\|oGs\|o5mCs\|dTs\|dTs\|5mCs\|dTs\|dTs\|5mCs\|dTs\|dGs\|5mCs\|dAs\|oGs\|LGs\|oAs\|oAs\|o5mC] |
| 4388 | [oGs\|LTs\|o5mCs\|oGs\|o5mCs\|dTs\|dTs\|5mCs\|dTs\|dTs\|5mCs\|dTs\|dGs\|5mCs\|dAs\|oGs\|oGs\|oAs\|oA] |
| 4389 | [oGs\|oTs\|L5mCs\|oGs\|o5mCs\|dTs\|dTs\|5mCs\|dTs\|dTs\|5mCs\|dTs\|dGs\|5mCs\|dAs\|oGs\|oGs\|oAs\|oA] |
| 4390 | [oGs\|oTs\|o5mCs\|LGs\|o5mCs\|dTs\|dTs\|5mCs\|dTs\|dTs\|5mCs\|dTs\|dGs\|5mCs\|dAs\|oGs\|oGs\|oAs\|oA] |
| 4391 | [oTs\|o5mCs\|oGs\|o5mCs\|dTs\|dTs\|5mCs\|dTs\|dTs\|5mCs\|dTs\|dGs\|5mCs\|dAs\|oGs\|oGs\|oAs\|LAs\|o5mC] |
| 4392 | [oTs\|o5mCs\|oGs\|o5mCs\|dTs\|dTs\|5mCs\|dTs\|dTs\|5mCs\|dTs\|dGs\|5mCs\|dAs\|oGs\|oGs\|LAs\|oAs\|o5mC] |
| 4393 | [oTs\|o5mCs\|oGs\|o5mCs\|dTs\|dTs\|5mCs\|dTs\|dTs\|5mCs\|dTs\|dGs\|5mCs\|dAs\|oGs\|LGs\|oAs\|oAs\|o5mC] |
| 4394 | [oGs\|LTs\|o5mCs\|oGs\|o5mCs\|dTs\|dTs\|5mCs\|dTs\|dTs\|5mCs\|dTs\|dGs\|5mCs\|dAs\|oGs\|oGs\|oA] |
| 4395 | [oGs\|oTs\|L5mCs\|oGs\|o5mCs\|dTs\|dTs\|5mCs\|dTs\|dTs\|5mCs\|dTs\|dGs\|5mCs\|dAs\|oGs\|oGs\|oA] |
| 4396 | [oGs\|oTs\|o5mCs\|LGs\|o5mCs\|dTs\|dTs\|5mCs\|dTs\|dTs\|5mCs\|dTs\|dGs\|5mCs\|dAs\|oGs\|oGs\|oA] |
| 4397 | [o5mCs\|oGs\|o5mCs\|dTs\|dTs\|5mCs\|dTs\|dTs\|5mCs\|dTs\|dGs\|5mCs\|dAs\|oGs\|oGs\|oAs\|LAs\|o5mC] |
| 4398 | [o5mCs\|oGs\|o5mCs\|dTs\|dTs\|5mCs\|dTs\|dTs\|5mCs\|dTs\|dGs\|5mCs\|dAs\|oGs\|oGs\|LAs\|oAs\|o5mC] |
| 4399 | [o5mCs\|oGs\|o5mCs\|dTs\|dTs\|5mCs\|dTs\|dTs\|5mCs\|dTs\|dGs\|5mCs\|dAs\|oGs\|LGs\|oAs\|oAs\|o5mC] |
| 4400 | [oGs\|LTs\|o5mCs\|oGs\|o5mCs\|dTs\|dTs\|5mCs\|dTs\|dTs\|5mCs\|dTs\|dGs\|5mCs\|dAs\|oGs\|oG] |
| 4401 | [oGs\|oTs\|L5mCs\|oGs\|o5mCs\|dTs\|dTs\|5mCs\|dTs\|dTs\|5mCs\|dTs\|dGs\|5mCs\|dAs\|oGs\|oG] |
| 4402 | [oGs\|oTs\|o5mCs\|LGs\|o5mCs\|dTs\|dTs\|5mCs\|dTs\|dTs\|5mCs\|dTs\|dGs\|5mCs\|dAs\|oGs\|oG] |
| 4403 | [oGs\|o5mCs\|dTs\|dTs\|5mCs\|dTs\|dTs\|5mCs\|dTs\|dGs\|5mCs\|dAs\|oGs\|oGs\|oAs\|LAs\|o5mC] |
| 4404 | [oGs\|o5mCs\|dTs\|dTs\|5mCs\|dTs\|dTs\|5mCs\|dTs\|dGs\|5mCs\|dAs\|oGs\|oGs\|LAs\|oAs\|o5mC] |
| 4405 | [oGs\|o5mCs\|dTs\|dTs\|5mCs\|dTs\|dTs\|5mCs\|dTs\|dGs\|5mCs\|dAs\|oGs\|LGs\|oAs\|oAs\|o5mC] |
| 4406 | [oTs\|L5mCs\|oGs\|o5mCs\|dTs\|dTs\|5mCs\|dTs\|dTs\|5mCs\|dTs\|dGs\|5mCs\|dAs\|oGs\|oGs\|oAs\|oAs\|o5mC] |
| 4407 | [oTs\|o5mCs\|LGs\|o5mCs\|dTs\|dTs\|5mCs\|dTs\|dTs\|5mCs\|dTs\|dGs\|5mCs\|dAs\|oGs\|oGs\|oAs\|oAs\|o5mC] |
| 4408 | [oGs\|oTs\|o5mCs\|oGs\|o5mCs\|dTs\|dTs\|5mCs\|dTs\|dTs\|5mCs\|dTs\|dGs\|5mCs\|dAs\|oGs\|oGs\|LAs\|oA] |
| 4409 | [oGs\|oTs\|o5mCs\|oGs\|o5mCs\|dTs\|dTs\|5mCs\|dTs\|dTs\|5mCs\|dTs\|dGs\|5mCs\|dAs\|oGs\|LGs\|oAs\|oA] |
| 4410 | [oTs\|L5mCs\|oGs\|o5mCs\|dTs\|dTs\|5mCs\|dTs\|dTs\|5mCs\|dTs\|dGs\|5mCs\|dAs\|oGs\|oGs\|oAs\|oA] |
| 4411 | [oTs\|o5mCs\|LGs\|o5mCs\|dTs\|dTs\|5mCs\|dTs\|dTs\|5mCs\|dTs\|dGs\|5mCs\|dAs\|oGs\|oGs\|oAs\|oA] |
| 4412 | [oTs\|o5mCs\|oGs\|o5mCs\|dTs\|dTs\|5mCs\|dTs\|dTs\|5mCs\|dTs\|dGs\|5mCs\|dAs\|oGs\|oGs\|LAs\|oA] |
| 4413 | [oTs\|o5mCs\|oGs\|o5mCs\|dTs\|dTs\|5mCs\|dTs\|dTs\|5mCs\|dTs\|dGs\|5mCs\|dAs\|oGs\|LGs\|oAs\|oA] |
| 4414 | [oTs\|L5mCs\|oGs\|o5mCs\|dTs\|dTs\|5mCs\|dTs\|dTs\|5mCs\|dTs\|dGs\|5mCs\|dAs\|oGs\|oGs\|oA] |
| 4415 | [oTs\|o5mCs\|LGs\|o5mCs\|dTs\|dTs\|5mCs\|dTs\|dTs\|5mCs\|dTs\|dGs\|5mCs\|dAs\|oGs\|oGs\|oA] |
| 4416 | [oTs\|o5mCs\|oGs\|o5mCs\|dTs\|dTs\|5mCs\|dTs\|dTs\|5mCs\|dTs\|dGs\|5mCs\|dAs\|oGs\|LGs\|oA] |
| 4417 | [oGs\|oTs\|o5mCs\|oGs\|o5mCs\|oTs\|oTs\|o5mCs\|dTs\|dTs\|5mCs\|dTs\|dGs\|5mCs\|dAs\|dGs\|dGs\|dAs\|oAs\|o5mC] |
| 4418 | [oGs\|oTs\|5mCs\|dGs\|5mCs\|dTs\|dTs\|5mCs\|dTs\|dTs\|5mCs\|dTs\|oGs\|o5mCs\|oAs\|oGs\|oGs\|oAs\|oAs\|o5mC] |
| 4419 | [oGs\|oTs\|o5mCs\|oGs\|o5mCs\|oTs\|oTs\|5mCs\|dTs\|dTs\|5mCs\|dTs\|dGs\|5mCs\|dAs\|dGs\|dGs\|oAs\|oAs\|o5mC] |
| 4420 | [oGs\|oTs\|o5mCs\|dGs\|5mCs\|dTs\|dTs\|5mCs\|dTs\|dTs\|5mCs\|dTs\|dGs\|o5mCs\|oAs\|oGs\|oGs\|oAs\|oAs\|o5mC] |
| 4421 | [oGs\|oTs\|o5mCs\|oGs\|o5mCs\|oTs\|oTs\|5mCs\|dTs\|dTs\|5mCs\|dTs\|dGs\|5mCs\|dAs\|dGs\|dGs\|oAs\|oA] |
| 4422 | [oTs\|o5mCs\|dGs\|5mCs\|dTs\|dTs\|5mCs\|dTs\|dTs\|5mCs\|dTs\|dGs\|o5mCs\|oAs\|oGs\|oGs\|oAs\|oAs\|o5mC] |
| 4423 | [oGs\|oTs\|o5mCs\|oGs\|o5mCs\|oTs\|dTs\|5mCs\|dTs\|dTs\|5mCs\|dTs\|dGs\|5mCs\|dAs\|dGs\|oGs\|oAs\|oAs\|o5mC] |
| 4424 | [oGs\|oTs\|o5mCs\|oGs\|5mCs\|dTs\|dTs\|5mCs\|dTs\|dTs\|5mCs\|dTs\|dGs\|5mCs\|oAs\|oGs\|oGs\|oAs\|oAs\|o5mC] |
| 4425 | [oGs\|oTs\|o5mCs\|oGs\|o5mCs\|oTs\|dTs\|5mCs\|dTs\|dTs\|5mCs\|dTs\|dGs\|5mCs\|dAs\|dGs\|oGs\|oAs\|oA] |
| 4426 | [oGs\|oTs\|o5mCs\|dGs\|5mCs\|dTs\|dTs\|5mCs\|dTs\|dTs\|5mCs\|dTs\|dGs\|5mCs\|oAs\|oGs\|oGs\|oAs\|oAs\|o5mC] |
| 4427 | [oGs\|oTs\|o5mCs\|oGs\|o5mCs\|oTs\|dTs\|5mCs\|dTs\|dTs\|5mCs\|dTs\|dGs\|5mCs\|dAs\|dGs\|oGs\|oA] |
| 4428 | [o5mCs\|oGs\|5mCs\|dTs\|dTs\|5mCs\|dTs\|dTs\|5mCs\|dTs\|dGs\|5mCs\|oAs\|oGs\|oGs\|oAs\|oAs\|o5mC] |
| 4429 | [oGs\|oTs\|o5mCs\|oGs\|o5mCs\|dTs\|dTs\|5mCs\|dTs\|dTs\|5mCs\|dTs\|dGs\|5mCs\|dAs\|oGs\|oGs\|oAs\|oAs\|o5mC] |
| 4430 | [oGs\|oTs\|o5mCs\|oGs\|o5mCs\|dTs\|dTs\|5mCs\|dTs\|dTs\|5mCs\|dTs\|dGs\|5mCs\|dAs\|oGs\|oGs\|oAs\|oA] |
| 4431 | [oGs\|oTs\|o5mCs\|oGs\|o5mCs\|dTs\|dTs\|5mCs\|dTs\|dTs\|5mCs\|dTs\|dGs\|5mCs\|dAs\|oGs\|oGs\|oA] |
| 4432 | [o5mCs\|oGs\|o5mCs\|dTs\|dTs\|5mCs\|dTs\|dTs\|5mCs\|dTs\|dGs\|5mCs\|dAs\|oGs\|oGs\|oAs\|oAs\|o5mC] |
| 4433 | [oGs\|oTs\|o5mCs\|oGs\|o5mCs\|dTs\|dTs\|5mCs\|dTs\|dTs\|5mCs\|dTs\|dGs\|5mCs\|dAs\|oGs\|oG] |
| 4434 | [oGs\|o5mCs\|dTs\|dTs\|5mCs\|dTs\|dTs\|5mCs\|dTs\|dGs\|5mCs\|dAs\|oGs\|oGs\|oAs\|oAs\|o5mC] |
| 4435 | [oTs\|o5mCs\|oGs\|o5mCs\|dTs\|dTs\|5mCs\|dTs\|dTs\|5mCs\|dTs\|dGs\|5mCs\|dAs\|oGs\|oGs\|oAs\|oAs\|o5mC] |
| 4436 | [oTs\|o5mCs\|oGs\|o5mCs\|dTs\|dTs\|5mCs\|dTs\|dTs\|5mCs\|dTs\|dGs\|5mCs\|dAs\|oGs\|oGs\|oAs\|oA] |
| 4437 | [oTs\|o5mCs\|oGs\|o5mCs\|dTs\|dTs\|5mCs\|dTs\|dTs\|5mCs\|dTs\|dGs\|5mCs\|dAs\|oGs\|oGs\|oA] |
| 4438 | [oGs\|oTs\|o5mCp\|oGs\|o5mCs\|dTs\|dTs\|5mCs\|dTs\|dTs\|5mCs\|dTs\|dGs\|5mCs\|dAs\|oGs\|oGs\|oAs\|oAs\|o5mC] |
| 4439 | [oGs\|oTs\|o5mCs\|oGp\|o5mCs\|dTs\|dTs\|5mCs\|dTs\|dTs\|5mCs\|dTs\|dGs\|5mCs\|dAs\|oGs\|oGs\|oAs\|oAs\|o5mC] |
| 4440 | [oGs\|oTs\|o5mCp\|oGp\|o5mCs\|dTs\|dTs\|5mCs\|dTs\|dTs\|5mCs\|dTs\|dGs\|5mCs\|dAs\|oGs\|oGs\|oAs\|oAs\|o5mC] |
| 4441 | [oGs\|oTs\|o5mCs\|oGs\|o5mCs\|dTs\|dTs\|5mCs\|dTs\|dTs\|5mCs\|dTs\|dGs\|5mCs\|dAs\|oGs\|oGp\|oAs\|oAs\|o5mC] |
| 4442 | [oGs\|oTs\|o5mCs\|oGs\|o5mCs\|dTs\|dTs\|5mCs\|dTs\|dTs\|5mCs\|dTs\|dGs\|5mCs\|dAs\|oGp\|oGs\|oAs\|oAs\|o5mC] |
| 4443 | [oGs\|oTs\|o5mCs\|oGs\|o5mCs\|dTs\|dTs\|5mCs\|dTs\|dTs\|5mCs\|dTs\|dGs\|5mCs\|dAs\|oGp\|oGp\|oAs\|oAs\|o5mC] |
| 4444 | [oGs\|oTs\|o5mCp\|oGs\|o5mCs\|dTs\|dTs\|5mCs\|dTs\|dTs\|5mCs\|dTs\|dGs\|5mCs\|dAs\|oGs\|oGp\|oAs\|oAs\|o5mC] |
| 4445 | [oGs\|oTs\|o5mCp\|oGs\|o5mCs\|dTs\|dTs\|5mCs\|dTs\|dTs\|5mCs\|dTs\|dGs\|5mCs\|dAs\|oGp\|oGs\|oAs\|oAs\|o5mC] |
| 4446 | [oGs\|oTs\|o5mCs\|oGp\|o5mCs\|dTs\|dTs\|5mCs\|dTs\|dTs\|5mCs\|dTs\|dGs\|5mCs\|dAs\|oGs\|oGp\|oAs\|oAs\|o5mC] |
| 4447 | [oGs\|oTs\|o5mCs\|oGp\|o5mCs\|dTs\|dTs\|5mCs\|dTs\|dTs\|5mCs\|dTs\|dGs\|5mCs\|dAs\|oGp\|oGs\|oAs\|oAs\|o5mC] |
| 4448 | [oGs\|oTs\|o5mCp\|oGs\|o5mCs\|dTs\|dTs\|5mCs\|dTs\|dTs\|5mCs\|dTs\|dGs\|5mCs\|dAs\|oGp\|oGp\|oAs\|oAs\|o5mC] |
| 4449 | [oGs\|oTs\|o5mCs\|oGp\|o5mCs\|dTs\|dTs\|5mCs\|dTs\|dTs\|5mCs\|dTs\|dGs\|5mCs\|dAs\|oGp\|oGp\|oAs\|oAs\|o5mC] |
| 4450 | [oGs\|oTs\|o5mCp\|oGp\|o5mCs\|dTs\|dTs\|5mCs\|dTs\|dTs\|5mCs\|dTs\|dGs\|5mCs\|dAs\|oGs\|oGp\|oAs\|oAs\|o5mC] |
| 4451 | [oGs\|oTs\|o5mCp\|oGp\|o5mCs\|dTs\|dTs\|5mCs\|dTs\|dTs\|5mCs\|dTs\|dGs\|5mCs\|dAs\|oGp\|oGs\|oAs\|oAs\|o5mC] |
| 4452 | [oGs\|oTs\|o5mCp\|oGp\|o5mCs\|dTs\|dTs\|5mCs\|dTs\|dTs\|5mCs\|dTs\|dGs\|5mCs\|dAs\|oGp\|oGp\|oAs\|oAs\|o5mC] |
| 4453 | [oGs\|oTs\|o5mCs\|oGs\|o5mCs\|dTs\|dTs\|5mCs\|dTs\|dTs\|5mCs\|dTs\|dGs\|5mCs\|dAs\|oGs\|oGs\|oAs\|oAs\|o5mCs\|oA] |
| 4454 | [oGs\|oTs\|o5mCp\|oGs\|o5mCs\|dTs\|dTs\|5mCs\|dTs\|dTs\|5mCs\|dTs\|dGs\|5mCs\|dAs\|oGs\|oGs\|oAs\|oAs\|o5mCs\|oA] |
| 4455 | [oGs\|oTs\|o5mCs\|oGp\|o5mCs\|dTs\|dTs\|5mCs\|dTs\|dTs\|5mCs\|dTs\|dGs\|5mCs\|dAs\|oGs\|oGs\|oAs\|oAs\|o5mCs\|oA] |
| 4456 | [oGs\|oTs\|o5mCp\|oGp\|o5mCs\|dTs\|dTs\|5mCs\|dTs\|dTs\|5mCs\|dTs\|dGs\|5mCs\|dAs\|oGs\|oGs\|oAs\|oAs\|o5mCs\|oA] |
| 4457 | [oGs\|oTs\|o5mCs\|oGs\|o5mCs\|dTs\|dTs\|5mCs\|dTs\|dTs\|5mCs\|dTs\|dGs\|5mCs\|dAs\|oGs\|oGp\|oAs\|oAs\|o5mCs\|oA] |
| 4458 | [oGs\|oTs\|o5mCs\|oGs\|o5mCs\|dTs\|dTs\|5mCs\|dTs\|dTs\|5mCs\|dTs\|dGs\|5mCs\|dAs\|oGp\|oGs\|oAs\|oAs\|o5mCs\|oA] |
| 4459 | [oGs\|oTs\|o5mCs\|oGs\|o5mCs\|dTs\|dTs\|5mCs\|dTs\|dTs\|5mCs\|dTs\|dGs\|5mCs\|dAs\|oGp\|oGp\|oAs\|oAs\|o5mCs\|oA] |
| 4460 | [oGs\|oTs\|o5mCp\|oGs\|o5mCs\|dTs\|dTs\|5mCs\|dTs\|dTs\|5mCs\|dTs\|dGs\|5mCs\|dAs\|oGs\|oGp\|oAs\|oAs\|o5mCs\|oA] |
| 4461 | [oGs\|oTs\|o5mCp\|oGs\|o5mCs\|dTs\|dTs\|5mCs\|dTs\|dTs\|5mCs\|dTs\|dGs\|5mCs\|dAs\|oGp\|oGs\|oAs\|oAs\|o5mCs\|oA] |
| 4462 | [oGs\|oTs\|o5mCs\|oGp\|o5mCs\|dTs\|dTs\|5mCs\|dTs\|dTs\|5mCs\|dTs\|dGs\|5mCs\|dAs\|oGs\|oGp\|oAs\|oAs\|o5mCs\|oA] |
| 4463 | [oGs\|oTs\|o5mCs\|oGp\|o5mCs\|dTs\|dTs\|5mCs\|dTs\|dTs\|5mCs\|dTs\|dGs\|5mCs\|dAs\|oGp\|oGs\|oAs\|oAs\|o5mCs\|oA] |
| 4464 | [oGs\|oTs\|o5mCp\|oGs\|o5mCs\|dTs\|dTs\|5mCs\|dTs\|dTs\|5mCs\|dTs\|dGs\|5mCs\|dAs\|oGp\|oGp\|oAs\|oAs\|o5mCs\|oA] |
| 4465 | [oGs\|oTs\|o5mCs\|oGp\|o5mCs\|dTs\|dTs\|5mCs\|dTs\|dTs\|5mCs\|dTs\|dGs\|5mCs\|dAs\|oGp\|oGp\|oAs\|oAs\|o5mCs\|oA] |
| 4466 | [oGs\|oTs\|o5mCp\|oGp\|o5mCs\|dTs\|dTs\|5mCs\|dTs\|dTs\|5mCs\|dTs\|dGs\|5mCs\|dAs\|oGs\|oGp\|oAs\|oAs\|o5mCs\|oA] |
| 4467 | [oGs\|oTs\|o5mCp\|oGp\|o5mCs\|dTs\|dTs\|5mCs\|dTs\|dTs\|5mCs\|dTs\|dGs\|5mCs\|dAs\|oGp\|oGs\|oAs\|oAs\|o5mCs\|oA] |
| 4468 | [oGs\|oTs\|o5mCp\|oGp\|o5mCs\|dTs\|dTs\|5mCs\|dTs\|dTs\|5mCs\|dTs\|dGs\|5mCs\|dAs\|oGp\|oGp\|oAs\|oAs\|o5mCs\|oA] |
| 4469 | [oGs\|oTs\|o5mCs\|oGs\|o5mCs\|dTs\|dTs\|5mCs\|dTs\|dTs\|5mCs\|dTs\|dGs\|5mCs\|dAs\|oGs\|oGs\|oAs\|oAs\|o5mCs\|oAs\|oT] |
| 4470 | [oGs\|oTs\|o5mCp\|oGs\|o5mCs\|dTs\|dTs\|5mCs\|dTs\|dTs\|5mCs\|dTs\|dGs\|5mCs\|dAs\|oGs\|oGs\|oAs\|oAs\|o5mCs\|oAs\|oT] |
| 4471 | [oGs\|oTs\|o5mCs\|oGp\|o5mCs\|dTs\|dTs\|5mCs\|dTs\|dTs\|5mCs\|dTs\|dGs\|5mCs\|dAs\|oGs\|oGs\|oAs\|oAs\|o5mCs\|oAs\|oT] |
| 4472 | [oGs\|oTs\|o5mCp\|oGp\|o5mCs\|dTs\|dTs\|5mCs\|dTs\|dTs\|5mCs\|dTs\|dGs\|5mCs\|dAs\|oGs\|oGs\|oAs\|oAs\|o5mCs\|oAs\|oT] |
| 4473 | [oGs\|oTs\|o5mCs\|oGs\|o5mCs\|dTs\|dTs\|5mCs\|dTs\|dTs\|5mCs\|dTs\|dGs\|5mCs\|dAs\|oGs\|oGp\|oAs\|oAs\|o5mCs\|oAs\|oT] |
| 4474 | [oGs\|oTs\|o5mCs\|oGs\|o5mCs\|dTs\|dTs\|5mCs\|dTs\|dTs\|5mCs\|dTs\|dGs\|5mCs\|dAs\|oGp\|oGs\|oAs\|oAs\|o5mCs\|oAs\|oT] |
| 4475 | [oGs\|oTs\|o5mCs\|oGs\|o5mCs\|dTs\|dTs\|5mCs\|dTs\|dTs\|5mCs\|dTs\|dGs\|5mCs\|dAs\|oGp\|oGp\|oAs\|oAs\|o5mCs\|oAs\|oT] |
| 4476 | [oGs\|oTs\|o5mCp\|oGs\|o5mCs\|dTs\|dTs\|5mCs\|dTs\|dTs\|5mCs\|dTs\|dGs\|5mCs\|dAs\|oGs\|oGp\|oAs\|oAs\|o5mCs\|oAs\|oT] |
| 4477 | [oGs\|oTs\|o5mCp\|oGs\|o5mCs\|dTs\|dTs\|5mCs\|dTs\|dTs\|5mCs\|dTs\|dGs\|5mCs\|dAs\|oGp\|oGs\|oAs\|oAs\|o5mCs\|oAs\|oT] |
| 4478 | [oGs\|oTs\|o5mCs\|oGp\|o5mCs\|dTs\|dTs\|5mCs\|dTs\|dTs\|5mCs\|dTs\|dGs\|5mCs\|dAs\|oGs\|oGp\|oAs\|oAs\|o5mCs\|oAs\|oT] |
| 4479 | [oGs\|oTs\|o5mCs\|oGp\|o5mCs\|dTs\|dTs\|5mCs\|dTs\|dTs\|5mCs\|dTs\|dGs\|5mCs\|dAs\|oGp\|oGs\|oAs\|oAs\|o5mCs\|oAs\|oT] |
| 4480 | [oGs\|oTs\|o5mCp\|oGs\|o5mCs\|dTs\|dTs\|5mCs\|dTs\|dTs\|5mCs\|dTs\|dGs\|5mCs\|dAs\|oGp\|oGp\|oAs\|oAs\|o5mCs\|oAs\|oT] |
| 4481 | [oGs\|oTs\|o5mCs\|oGp\|o5mCs\|dTs\|dTs\|5mCs\|dTs\|dTs\|5mCs\|dTs\|dGs\|5mCs\|dAs\|oGp\|oGp\|oAs\|oAs\|o5mCs\|oAs\|oT] |
| 4482 | [oGs\|oTs\|o5mCp\|oGp\|o5mCs\|dTs\|dTs\|5mCs\|dTs\|dTs\|5mCs\|dTs\|dGs\|5mCs\|dAs\|oGs\|oGp\|oAs\|oAs\|o5mCs\|oAs\|oT] |
| 4483 | [oGs\|oTs\|o5mCp\|oGp\|o5mCs\|dTs\|dTs\|5mCs\|dTs\|dTs\|5mCs\|dTs\|dGs\|5mCs\|dAs\|oGp\|oGs\|oAs\|oAs\|o5mCs\|oAs\|oT] |
| 4484 | [oGs\|oTs\|o5mCp\|oGp\|o5mCs\|dTs\|dTs\|5mCs\|dTs\|dTs\|5mCs\|dTs\|dGs\|5mCs\|dAs\|oGp\|oGp\|oAs\|oAs\|o5mCs\|oAs\|oT] |
| 4485 | [oGs\|oTs\|o5mCs\|oGs\|o5mCs\|dTs\|dTs\|5mCs\|dTs\|dTs\|5mCs\|dTs\|dGs\|5mCs\|dAs\|oGs\|oGs\|oAs\|oAs\|o5mCs\|oAs\|oTs\|oA] |
| 4486 | [oGs\|oTs\|o5mCp\|oGs\|o5mCs\|dTs\|dTs\|5mCs\|dTs\|dTs\|5mCs\|dTs\|dGs\|5mCs\|dAs\|oGs\|oGs\|oAs\|oAs\|o5mCs\|oAs\|oTs\|oA] |
| 4487 | [oGs\|oTs\|o5mCs\|oGp\|o5mCs\|dTs\|dTs\|5mCs\|dTs\|dTs\|5mCs\|dTs\|dGs\|5mCs\|dAs\|oGs\|oGs\|oAs\|oAs\|o5mCs\|oAs\|oTs\|oA] |
| 4488 | [oGs\|oTs\|o5mCp\|oGp\|o5mCs\|dTs\|dTs\|5mCs\|dTs\|dTs\|5mCs\|dTs\|dGs\|5mCs\|dAs\|oGs\|oGs\|oAs\|oAs\|o5mCs\|oAs\|oTs\|oA] |
| 4489 | [oGs\|oTs\|o5mCs\|oGs\|o5mCs\|dTs\|dTs\|5mCs\|dTs\|dTs\|5mCs\|dTs\|dGs\|5mCs\|dAs\|oGs\|oGp\|oAs\|oAs\|o5mCs\|oAs\|oTs\|oA] |
| 4490 | [oGs\|oTs\|o5mCs\|oGs\|o5mCs\|dTs\|dTs\|5mCs\|dTs\|dTs\|5mCs\|dTs\|dGs\|5mCs\|dAs\|oGp\|oGs\|oAs\|oAs\|o5mCs\|oAs\|oTs\|oA] |
| 4491 | [oGs\|oTs\|o5mCs\|oGs\|o5mCs\|dTs\|dTs\|5mCs\|dTs\|dTs\|5mCs\|dTs\|dGs\|5mCs\|dAs\|oGp\|oGp\|oAs\|oAs\|o5mCs\|oAs\|oTs\|oA] |
| 4492 | [oGs\|oTs\|o5mCp\|oGs\|o5mCs\|dTs\|dTs\|5mCs\|dTs\|dTs\|5mCs\|dTs\|dGs\|5mCs\|dAs\|oGs\|oGp\|oAs\|oAs\|o5mCs\|oAs\|oTs\|oA] |
| 4493 | [oGs\|oTs\|o5mCp\|oGs\|o5mCs\|dTs\|dTs\|5mCs\|dTs\|dTs\|5mCs\|dTs\|dGs\|5mCs\|dAs\|oGp\|oGs\|oAs\|oAs\|o5mCs\|oAs\|oTs\|oA] |
| 4494 | [oGs\|oTs\|o5mCs\|oGp\|o5mCs\|dTs\|dTs\|5mCs\|dTs\|dTs\|5mCs\|dTs\|dGs\|5mCs\|dAs\|oGs\|oGp\|oAs\|oAs\|o5mCs\|oAs\|oTs\|oA] |
| 4495 | [oGs\|oTs\|o5mCs\|oGp\|o5mCs\|dTs\|dTs\|5mCs\|dTs\|dTs\|5mCs\|dTs\|dGs\|5mCs\|dAs\|oGp\|oGs\|oAs\|oAs\|o5mCs\|oAs\|oTs\|oA] |
| 4496 | [oGs\|oTs\|o5mCp\|oGs\|o5mCs\|dTs\|dTs\|5mCs\|dTs\|dTs\|5mCs\|dTs\|dGs\|5mCs\|dAs\|oGp\|oGp\|oAs\|oAs\|o5mCs\|oAs\|oTs\|oA] |
| 4497 | [oGs\|oTs\|o5mCs\|oGp\|o5mCs\|dTs\|dTs\|5mCs\|dTs\|dTs\|5mCs\|dTs\|dGs\|5mCs\|dAs\|oGp\|oGp\|oAs\|oAs\|o5mCs\|oAs\|oTs\|oA] |
| 4498 | [oGs\|oTs\|o5mCp\|oGp\|o5mCs\|dTs\|dTs\|5mCs\|dTs\|dTs\|5mCs\|dTs\|dGs\|5mCs\|dAs\|oGs\|oGp\|oAs\|oAs\|o5mCs\|oAs\|oTs\|oA] |
| 4499 | [oGs\|oTs\|o5mCp\|oGp\|o5mCs\|dTs\|dTs\|5mCs\|dTs\|dTs\|5mCs\|dTs\|dGs\|5mCs\|dAs\|oGp\|oGs\|oAs\|oAs\|o5mCs\|oAs\|oTs\|oA] |
| 4500 | [oGs\|oTs\|o5mCp\|oGp\|o5mCs\|dTs\|dTs\|5mCs\|dTs\|dTs\|5mCs\|dTs\|dGs\|5mCs\|dAs\|oGp\|oGp\|oAs\|oAs\|o5mCs\|oAs\|oTs\|oA] |
| 4501 | [oGs\|oTs\|o5mCs\|oGs\|o5mCs\|dTs\|dTs\|5mCs\|dTs\|dTs\|5mCs\|dTs\|dGs\|5mCs\|dAs\|dGs\|oGs\|oAs\|oAs\|o5mCs\|oA] |
| 4502 | [oGs\|oTs\|o5mCp\|oGs\|o5mCs\|dTs\|dTs\|5mCs\|dTs\|dTs\|5mCs\|dTs\|dGs\|5mCs\|dAs\|dGs\|oGs\|oAs\|oAs\|o5mCs\|oA] |
| 4503 | [oGs\|oTs\|o5mCs\|oGp\|o5mCs\|dTs\|dTs\|5mCs\|dTs\|dTs\|5mCs\|dTs\|dGs\|5mCs\|dAs\|dGs\|oGs\|oAs\|oAs\|o5mCs\|oA] |
| 4504 | [oGs\|oTs\|o5mCp\|oGp\|o5mCs\|dTs\|dTs\|5mCs\|dTs\|dTs\|5mCs\|dTs\|dGs\|5mCs\|dAs\|dGs\|oGs\|oAs\|oAs\|o5mCs\|oA] |
| 4505 | [oGs\|oTs\|o5mCs\|oGs\|o5mCs\|dTs\|dTs\|5mCs\|dTs\|dTs\|5mCs\|dTs\|dGs\|5mCs\|dAs\|dGs\|oGp\|oAs\|oAs\|o5mCs\|oA] |
| 4506 | [oGs\|oTs\|o5mCs\|oGs\|o5mCs\|dTs\|dTs\|5mCs\|dTs\|dTs\|5mCs\|dTs\|dGs\|5mCs\|dAs\|dGp\|oGs\|oAs\|oAs\|o5mCs\|oA] |
| 4507 | [oGs\|oTs\|o5mCs\|oGs\|o5mCs\|dTs\|dTs\|5mCs\|dTs\|dTs\|5mCs\|dTs\|dGs\|5mCs\|dAs\|dGp\|oGp\|oAs\|oAs\|o5mCs\|oA] |
| 4508 | [oGs\|oTs\|o5mCp\|oGs\|o5mCs\|dTs\|dTs\|5mCs\|dTs\|dTs\|5mCs\|dTs\|dGs\|5mCs\|dAs\|dGs\|oGp\|oAs\|oAs\|o5mCs\|oA] |
| 4509 | [oGs\|oTs\|o5mCp\|oGs\|o5mCs\|dTs\|dTs\|5mCs\|dTs\|dTs\|5mCs\|dTs\|dGs\|5mCs\|dAs\|dGp\|oGs\|oAs\|oAs\|o5mCs\|oA] |
| 4510 | [oGs\|oTs\|o5mCs\|oGp\|o5mCs\|dTs\|dTs\|5mCs\|dTs\|dTs\|5mCs\|dTs\|dGs\|5mCs\|dAs\|dGs\|oGp\|oAs\|oAs\|o5mCs\|oA] |
| 4511 | [oGs\|oTs\|o5mCs\|oGp\|o5mCs\|dTs\|dTs\|5mCs\|dTs\|dTs\|5mCs\|dTs\|dGs\|5mCs\|dAs\|dGp\|oGs\|oAs\|oAs\|o5mCs\|oA] |
| 4512 | [oGs\|oTs\|o5mCp\|oGs\|o5mCs\|dTs\|dTs\|5mCs\|dTs\|dTs\|5mCs\|dTs\|dGs\|5mCs\|dAs\|dGp\|oGp\|oAs\|oAs\|o5mCs\|oA] |
| 4513 | [oGs\|oTs\|o5mCs\|oGp\|o5mCs\|dTs\|dTs\|5mCs\|dTs\|dTs\|5mCs\|dTs\|dGs\|5mCs\|dAs\|dGp\|oGp\|oAs\|oAs\|o5mCs\|oA] |
| 4514 | [oGs\|oTs\|o5mCp\|oGp\|o5mCs\|dTs\|dTs\|5mCs\|dTs\|dTs\|5mCs\|dTs\|dGs\|5mCs\|dAs\|dGs\|oGp\|oAs\|oAs\|o5mCs\|oA] |
| 4515 | [oGs\|oTs\|o5mCp\|oGp\|o5mCs\|dTs\|dTs\|5mCs\|dTs\|dTs\|5mCs\|dTs\|dGs\|5mCs\|dAs\|dGp\|oGs\|oAs\|oAs\|o5mCs\|oA] |
| 4516 | [oGs\|oTs\|o5mCp\|oGp\|o5mCs\|dTs\|dTs\|5mCs\|dTs\|dTs\|5mCs\|dTs\|dGs\|5mCs\|dAs\|dGp\|oGp\|oAs\|oAs\|o5mCs\|oA] |
| 4517 | [oGs\|oTs\|o5mCs\|oGs\|o5mCs\|dTs\|dTs\|5mCs\|dTs\|dTs\|5mCs\|dTs\|dGs\|5mCs\|dAs\|dGs\|dGs\|oAs\|oAs\|o5mCs\|oAs\|oT] |
| 4518 | [oGs\|oTs\|o5mCp\|oGs\|o5mCs\|dTs\|dTs\|5mCs\|dTs\|dTs\|5mCs\|dTs\|dGs\|5mCs\|dAs\|dGs\|dGs\|oAs\|oAs\|o5mCs\|oAs\|oT] |
| 4519 | [oGs\|oTs\|o5mCs\|oGp\|o5mCs\|dTs\|dTs\|5mCs\|dTs\|dTs\|5mCs\|dTs\|dGs\|5mCs\|dAs\|dGs\|dGs\|oAs\|oAs\|o5mCs\|oAs\|oT] |
| 4520 | [oGs\|oTs\|o5mCp\|oGp\|o5mCs\|dTs\|dTs\|5mCs\|dTs\|dTs\|5mCs\|dTs\|dGs\|5mCs\|dAs\|dGs\|dGs\|oAs\|oAs\|o5mCs\|oAs\|oT] |
| 4521 | [oGs\|oTs\|o5mCs\|oGs\|o5mCs\|dTs\|dTs\|5mCs\|dTs\|dTs\|5mCs\|dTs\|dGs\|5mCs\|dAs\|dGs\|dGp\|oAs\|oAs\|o5mCs\|oAs\|oT] |
| 4522 | [oGs\|oTs\|o5mCs\|oGs\|o5mCs\|dTs\|dTs\|5mCs\|dTs\|dTs\|5mCs\|dTs\|dGs\|5mCs\|dAs\|dGp\|dGs\|oAs\|oAs\|o5mCs\|oAs\|oT] |
| 4523 | [oGs\|oTs\|o5mCs\|oGs\|o5mCs\|dTs\|dTs\|5mCs\|dTs\|dTs\|5mCs\|dTs\|dGs\|5mCs\|dAs\|dGp\|dGp\|oAs\|oAs\|o5mCs\|oAs\|oT] |
| 4524 | [oGs\|oTs\|o5mCp\|oGs\|o5mCs\|dTs\|dTs\|5mCs\|dTs\|dTs\|5mCs\|dTs\|dGs\|5mCs\|dAs\|dGs\|dGp\|oAs\|oAs\|o5mCs\|oAs\|oT] |
| 4525 | [oGs\|oTs\|o5mCp\|oGs\|o5mCs\|dTs\|dTs\|5mCs\|dTs\|dTs\|5mCs\|dTs\|dGs\|5mCs\|dAs\|dGp\|dGs\|oAs\|oAs\|o5mCs\|oAs\|oT] |
| 4526 | [oGs\|oTs\|o5mCs\|oGp\|o5mCs\|dTs\|dTs\|5mCs\|dTs\|dTs\|5mCs\|dTs\|dGs\|5mCs\|dAs\|dGs\|dGp\|oAs\|oAs\|o5mCs\|oAs\|oT] |
| 4527 | [oGs\|oTs\|o5mCs\|oGp\|o5mCs\|dTs\|dTs\|5mCs\|dTs\|dTs\|5mCs\|dTs\|dGs\|5mCs\|dAs\|dGp\|dGs\|oAs\|oAs\|o5mCs\|oAs\|oT] |
| 4528 | [oGs\|oTs\|o5mCp\|oGs\|o5mCs\|dTs\|dTs\|5mCs\|dTs\|dTs\|5mCs\|dTs\|dGs\|5mCs\|dAs\|dGp\|dGp\|oAs\|oAs\|o5mCs\|oAs\|oT] |
| 4529 | [oGs\|oTs\|o5mCs\|oGp\|o5mCs\|dTs\|dTs\|5mCs\|dTs\|dTs\|5mCs\|dTs\|dGs\|5mCs\|dAs\|dGp\|dGp\|oAs\|oAs\|o5mCs\|oAs\|oT] |
| 4530 | [oGs\|oTs\|o5mCp\|oGp\|o5mCs\|dTs\|dTs\|5mCs\|dTs\|dTs\|5mCs\|dTs\|dGs\|5mCs\|dAs\|dGs\|dGp\|oAs\|oAs\|o5mCs\|oAs\|oT] |
| 4531 | [oGs\|oTs\|o5mCp\|oGp\|o5mCs\|dTs\|dTs\|5mCs\|dTs\|dTs\|5mCs\|dTs\|dGs\|5mCs\|dAs\|dGp\|dGs\|oAs\|oAs\|o5mCs\|oAs\|oT] |
| 4532 | [oGs\|oTs\|o5mCp\|oGp\|o5mCs\|dTs\|dTs\|5mCs\|dTs\|dTs\|5mCs\|dTs\|dGs\|5mCs\|dAs\|dGp\|dGp\|oAs\|oAs\|o5mCs\|oAs\|oT] |
| 4533 | [oTs\|LGs\|oTs\|o5mCs\|oGs\|o5mCs\|oTs\|oTs\|5mCs\|dTs\|dTs\|5mCs\|dTs\|dGs\|5mCs\|dAs\|dGs\|dGs\|oAs\|oA] |
| 4534 | [oTs\|oGs\|LTs\|o5mCs\|oGs\|o5mCs\|oTs\|oTs\|5mCs\|dTs\|dTs\|5mCs\|dTs\|dGs\|5mCs\|dAs\|dGs\|dGs\|oAs\|oA] |
| 4535 | [oTs\|oGs\|oTs\|L5mCs\|oGs\|o5mCs\|oTs\|oTs\|5mCs\|dTs\|dTs\|5mCs\|dTs\|dGs\|5mCs\|dAs\|dGs\|dGs\|oAs\|oA] |
| 4536 | [oTs\|oGs\|oTs\|o5mCs\|LGs\|o5mCs\|oTs\|oTs\|5mCs\|dTs\|dTs\|5mCs\|dTs\|dGs\|5mCs\|dAs\|dGs\|dGs\|oAs\|oA] |
| 4537 | [oTs\|oGs\|oTs\|o5mCs\|oGs\|L5mCs\|oTs\|oTs\|5mCs\|dTs\|dTs\|5mCs\|dTs\|dGs\|5mCs\|dAs\|dGs\|dGs\|oAs\|oA] |
| 4538 | [oTs\|oGs\|oTs\|o5mCs\|oGs\|o5mCs\|LTs\|oTs\|5mCs\|dTs\|dTs\|5mCs\|dTs\|dGs\|5mCs\|dAs\|dGs\|dGs\|oAs\|oA] |
| 4539 | [oTs\|oGs\|dTs\|5mCs\|dGs\|5mCs\|dTs\|dTs\|5mCs\|dTs\|dTs\|5mCs\|oTs\|oGs\|o5mCs\|oAs\|oGs\|oGs\|LAs\|oA] |
| 4540 | [oTs\|oGs\|dTs\|5mCs\|dGs\|5mCs\|dTs\|dTs\|5mCs\|dTs\|dTs\|5mCs\|oTs\|oGs\|o5mCs\|oAs\|oGs\|LGs\|oAs\|oA] |
| 4541 | [oTs\|oGs\|dTs\|5mCs\|dGs\|5mCs\|dTs\|dTs\|5mCs\|dTs\|dTs\|5mCs\|oTs\|oGs\|o5mCs\|oAs\|LGs\|oGs\|oAs\|oA] |
| 4542 | [oTs\|oGs\|dTs\|5mCs\|dGs\|5mCs\|dTs\|dTs\|5mCs\|dTs\|dTs\|5mCs\|oTs\|oGs\|o5mCs\|LAs\|oGs\|oGs\|oAs\|oA] |
| 4543 | [oTs\|oGs\|dTs\|5mCs\|dGs\|5mCs\|dTs\|dTs\|5mCs\|dTs\|dTs\|5mCs\|oTs\|oGs\|L5mCs\|oAs\|oGs\|oGs\|oAs\|oA] |
| 4544 | [oTs\|oGs\|dTs\|5mCs\|dGs\|5mCs\|dTs\|dTs\|5mCs\|dTs\|dTs\|5mCs\|oTs\|LGs\|o5mCs\|oAs\|oGs\|oGs\|oAs\|oA] |
| 4545 | [oTs\|LGs\|oTs\|o5mCs\|oGs\|o5mCs\|oTs\|dTs\|5mCs\|dTs\|dTs\|5mCs\|dTs\|dGs\|5mCs\|dAs\|dGs\|oGs\|oAs\|oA] |
| 4546 | [oTs\|oGs\|LTs\|o5mCs\|oGs\|o5mCs\|oTs\|dTs\|5mCs\|dTs\|dTs\|5mCs\|dTs\|dGs\|5mCs\|dAs\|dGs\|oGs\|oAs\|oA] |
| 4547 | [oTs\|oGs\|oTs\|L5mCs\|oGs\|o5mCs\|oTs\|dTs\|5mCs\|dTs\|dTs\|5mCs\|dTs\|dGs\|5mCs\|dAs\|dGs\|oGs\|oAs\|oA] |
| 4548 | [oTs\|oGs\|oTs\|o5mCs\|LGs\|o5mCs\|oTs\|dTs\|5mCs\|dTs\|dTs\|5mCs\|dTs\|dGs\|5mCs\|dAs\|dGs\|oGs\|oAs\|oA] |
| 4549 | [oTs\|oGs\|oTs\|o5mCs\|oGs\|L5mCs\|oTs\|dTs\|5mCs\|dTs\|dTs\|5mCs\|dTs\|dGs\|5mCs\|dAs\|dGs\|oGs\|oAs\|oA] |
| 4550 | [oTs\|oGs\|oTs\|5mCs\|dGs\|5mCs\|dTs\|dTs\|5mCs\|dTs\|dTs\|5mCs\|dTs\|oGs\|o5mCs\|oAs\|oGs\|oGs\|LAs\|oA] |
| 4551 | [oTs\|oGs\|oTs\|5mCs\|dGs\|5mCs\|dTs\|dTs\|5mCs\|dTs\|dTs\|5mCs\|dTs\|oGs\|o5mCs\|oAs\|oGs\|LGs\|oAs\|oA] |
| 4552 | [oTs\|oGs\|oTs\|5mCs\|dGs\|5mCs\|dTs\|dTs\|5mCs\|dTs\|dTs\|5mCs\|dTs\|oGs\|o5mCs\|oAs\|LGs\|oGs\|oAs\|oA] |
| 4553 | [oTs\|oGs\|oTs\|5mCs\|dGs\|5mCs\|dTs\|dTs\|5mCs\|dTs\|dTs\|5mCs\|dTs\|oGs\|o5mCs\|LAs\|oGs\|oGs\|oAs\|oA] |
| 4554 | [oTs\|oGs\|oTs\|5mCs\|dGs\|5mCs\|dTs\|dTs\|5mCs\|dTs\|dTs\|5mCs\|dTs\|oGs\|L5mCs\|oAs\|oGs\|oGs\|oAs\|oA] |
| 4555 | [oTs\|LGs\|oTs\|o5mCs\|oGs\|o5mCs\|oTs\|dTs\|5mCs\|dTs\|dTs\|5mCs\|dTs\|dGs\|5mCs\|dAs\|dGs\|oGs\|oA] |
| 4556 | [oTs\|oGs\|LTs\|o5mCs\|oGs\|o5mCs\|oTs\|dTs\|5mCs\|dTs\|dTs\|5mCs\|dTs\|dGs\|5mCs\|dAs\|dGs\|oGs\|oA] |
| 4557 | [oTs\|oGs\|oTs\|L5mCs\|oGs\|o5mCs\|oTs\|dTs\|5mCs\|dTs\|dTs\|5mCs\|dTs\|dGs\|5mCs\|dAs\|dGs\|oGs\|oA] |
| 4558 | [oTs\|oGs\|oTs\|o5mCs\|LGs\|o5mCs\|oTs\|dTs\|5mCs\|dTs\|dTs\|5mCs\|dTs\|dGs\|5mCs\|dAs\|dGs\|oGs\|oA] |
| 4559 | [oTs\|oGs\|oTs\|o5mCs\|oGs\|L5mCs\|oTs\|dTs\|5mCs\|dTs\|dTs\|5mCs\|dTs\|dGs\|5mCs\|dAs\|dGs\|oGs\|oA] |
| 4560 | [oGs\|oTs\|5mCs\|dGs\|5mCs\|dTs\|dTs\|5mCs\|dTs\|dTs\|5mCs\|dTs\|oGs\|o5mCs\|oAs\|oGs\|oGs\|LAs\|oA] |
| 4561 | [oGs\|oTs\|5mCs\|dGs\|5mCs\|dTs\|dTs\|5mCs\|dTs\|dTs\|5mCs\|dTs\|oGs\|o5mCs\|oAs\|oGs\|LGs\|oAs\|oA] |
| 4562 | [oGs\|oTs\|5mCs\|dGs\|5mCs\|dTs\|dTs\|5mCs\|dTs\|dTs\|5mCs\|dTs\|oGs\|o5mCs\|oAs\|LGs\|oGs\|oAs\|oA] |
| 4563 | [oGs\|oTs\|5mCs\|dGs\|5mCs\|dTs\|dTs\|5mCs\|dTs\|dTs\|5mCs\|dTs\|oGs\|o5mCs\|LAs\|oGs\|oGs\|oAs\|oA] |
| 4564 | [oGs\|oTs\|5mCs\|dGs\|5mCs\|dTs\|dTs\|5mCs\|dTs\|dTs\|5mCs\|dTs\|oGs\|L5mCs\|oAs\|oGs\|oGs\|oAs\|oA] |
| 4565 | [oTs\|LGs\|oTs\|o5mCs\|oGs\|o5mCs\|dTs\|dTs\|5mCs\|dTs\|dTs\|5mCs\|dTs\|dGs\|5mCs\|dAs\|oGs\|oGs\|oAs\|oA] |
| 4566 | [oTs\|oGs\|LTs\|o5mCs\|oGs\|o5mCs\|dTs\|dTs\|5mCs\|dTs\|dTs\|5mCs\|dTs\|dGs\|5mCs\|dAs\|oGs\|oGs\|oAs\|oA] |
| 4567 | [oTs\|oGs\|oTs\|L5mCs\|oGs\|o5mCs\|dTs\|dTs\|5mCs\|dTs\|dTs\|5mCs\|dTs\|dGs\|5mCs\|dAs\|oGs\|oGs\|oAs\|oA] |
| 4568 | [oTs\|oGs\|oTs\|o5mCs\|LGs\|o5mCs\|dTs\|dTs\|5mCs\|dTs\|dTs\|5mCs\|dTs\|dGs\|5mCs\|dAs\|oGs\|oGs\|oAs\|oA] |
| 4569 | [oTs\|oGs\|oTs\|o5mCs\|dGs\|5mCs\|dTs\|dTs\|5mCs\|dTs\|dTs\|5mCs\|dTs\|dGs\|o5mCs\|oAs\|oGs\|oGs\|LAs\|oA] |
| 4570 | [oTs\|oGs\|oTs\|o5mCs\|dGs\|5mCs\|dTs\|dTs\|5mCs\|dTs\|dTs\|5mCs\|dTs\|dGs\|o5mCs\|oAs\|oGs\|LGs\|oAs\|oA] |
| 4571 | [oTs\|oGs\|oTs\|o5mCs\|dGs\|5mCs\|dTs\|dTs\|5mCs\|dTs\|dTs\|5mCs\|dTs\|dGs\|o5mCs\|oAs\|LGs\|oGs\|oAs\|oA] |
| 4572 | [oTs\|oGs\|oTs\|o5mCs\|dGs\|5mCs\|dTs\|dTs\|5mCs\|dTs\|dTs\|5mCs\|dTs\|dGs\|o5mCs\|LAs\|oGs\|oGs\|oAs\|oA] |
| 4573 | [oTs\|LGs\|oTs\|o5mCs\|oGs\|o5mCs\|dTs\|dTs\|5mCs\|dTs\|dTs\|5mCs\|dTs\|dGs\|5mCs\|dAs\|oGs\|oGs\|oA] |
| 4574 | [oTs\|oGs\|LTs\|o5mCs\|oGs\|o5mCs\|dTs\|dTs\|5mCs\|dTs\|dTs\|5mCs\|dTs\|dGs\|5mCs\|dAs\|oGs\|oGs\|oA] |
| 4575 | [oTs\|oGs\|oTs\|L5mCs\|oGs\|o5mCs\|dTs\|dTs\|5mCs\|dTs\|dTs\|5mCs\|dTs\|dGs\|5mCs\|dAs\|oGs\|oGs\|oA] |
| 4576 | [oTs\|oGs\|oTs\|o5mCs\|LGs\|o5mCs\|dTs\|dTs\|5mCs\|dTs\|dTs\|5mCs\|dTs\|dGs\|5mCs\|dAs\|oGs\|oGs\|oA] |
| 4577 | [oTs\|oGs\|oTs\|5mCs\|dGs\|5mCs\|dTs\|dTs\|5mCs\|dTs\|dTs\|5mCs\|dTs\|dGs\|o5mCs\|oAs\|oGs\|oGs\|LAs\|oA] |
| 4578 | [oTs\|oGs\|oTs\|5mCs\|dGs\|5mCs\|dTs\|dTs\|5mCs\|dTs\|dTs\|5mCs\|dTs\|dGs\|o5mCs\|oAs\|oGs\|LGs\|oAs\|oA] |
| 4579 | [oTs\|oGs\|oTs\|5mCs\|dGs\|5mCs\|dTs\|dTs\|5mCs\|dTs\|dTs\|5mCs\|dTs\|dGs\|o5mCs\|oAs\|LGs\|oGs\|oAs\|oA] |
| 4580 | [oTs\|LGs\|oTs\|o5mCs\|oGs\|o5mCs\|dTs\|dTs\|5mCs\|dTs\|dTs\|5mCs\|dTs\|dGs\|5mCs\|dAs\|oGs\|oG] |
| 4581 | [oTs\|oGs\|LTs\|o5mCs\|oGs\|o5mCs\|dTs\|dTs\|5mCs\|dTs\|dTs\|5mCs\|dTs\|dGs\|5mCs\|dAs\|oGs\|oG] |
| 4582 | [oTs\|oGs\|oTs\|L5mCs\|oGs\|o5mCs\|dTs\|dTs\|5mCs\|dTs\|dTs\|5mCs\|dTs\|dGs\|5mCs\|dAs\|oGs\|oG] |
| 4583 | [oTs\|oGs\|oTs\|o5mCs\|LGs\|o5mCs\|dTs\|dTs\|5mCs\|dTs\|dTs\|5mCs\|dTs\|dGs\|5mCs\|dAs\|oGs\|oG] |
| 4584 | [oTs\|o5mCs\|dGs\|5mCs\|dTs\|dTs\|5mCs\|dTs\|dTs\|5mCs\|dTs\|dGs\|o5mCs\|oAs\|oGs\|oGs\|LAs\|oA] |
| 4585 | [oTs\|o5mCs\|dGs\|5mCs\|dTs\|dTs\|5mCs\|dTs\|dTs\|5mCs\|dTs\|dGs\|o5mCs\|oAs\|oGs\|LGs\|oAs\|oA] |
| 4586 | [oTs\|o5mCs\|dGs\|5mCs\|dTs\|dTs\|5mCs\|dTs\|dTs\|5mCs\|dTs\|dGs\|o5mCs\|oAs\|LGs\|oGs\|oAs\|oA] |
| 4587 | [oTs\|o5mCs\|dGs\|5mCs\|dTs\|dTs\|5mCs\|dTs\|dTs\|5mCs\|dTs\|dGs\|o5mCs\|LAs\|oGs\|oGs\|oAs\|oA] |
| 4588 | [oTs\|LGs\|oTs\|o5mCs\|oGs\|5mCs\|dTs\|dTs\|5mCs\|dTs\|dTs\|5mCs\|dTs\|dGs\|5mCs\|oAs\|oGs\|oGs\|oAs\|oA] |
| 4589 | [oTs\|oGs\|LTs\|o5mCs\|oGs\|5mCs\|dTs\|dTs\|5mCs\|dTs\|dTs\|5mCs\|dTs\|dGs\|5mCs\|oAs\|oGs\|oGs\|oAs\|oA] |
| 4590 | [oTs\|oGs\|oTs\|L5mCs\|oGs\|5mCs\|dTs\|dTs\|5mCs\|dTs\|dTs\|5mCs\|dTs\|dGs\|5mCs\|oAs\|oGs\|oGs\|oAs\|oA] |
| 4591 | [oTs\|oGs\|oTs\|o5mCs\|oGs\|5mCs\|dTs\|dTs\|5mCs\|dTs\|dTs\|5mCs\|dTs\|dGs\|5mCs\|oAs\|oGs\|oGs\|LAs\|oA] |
| 4592 | [oTs\|oGs\|oTs\|o5mCs\|oGs\|5mCs\|dTs\|dTs\|5mCs\|dTs\|dTs\|5mCs\|dTs\|dGs\|5mCs\|oAs\|oGs\|LGs\|oAs\|oA] |
| 4593 | [oTs\|oGs\|oTs\|o5mCs\|oGs\|5mCs\|dTs\|dTs\|5mCs\|dTs\|dTs\|5mCs\|dTs\|dGs\|5mCs\|oAs\|LGs\|oGs\|oAs\|oA] |
| 4594 | [oTs\|LGs\|oTs\|o5mCs\|oGs\|5mCs\|dTs\|dTs\|5mCs\|dTs\|dTs\|5mCs\|dTs\|dGs\|5mCs\|oAs\|oGs\|oGs\|oA] |
| 4595 | [oTs\|oGs\|LTs\|o5mCs\|oGs\|5mCs\|dTs\|dTs\|5mCs\|dTs\|dTs\|5mCs\|dTs\|dGs\|5mCs\|oAs\|oGs\|oGs\|oA] |
| 4596 | [oTs\|oGs\|oTs\|L5mCs\|oGs\|5mCs\|dTs\|dTs\|5mCs\|dTs\|dTs\|5mCs\|dTs\|dGs\|5mCs\|oAs\|oGs\|oGs\|oA] |
| 4597 | [oGs\|oTs\|o5mCs\|oGs\|5mCs\|dTs\|dTs\|5mCs\|dTs\|dTs\|5mCs\|dTs\|dGs\|5mCs\|oAs\|oGs\|oGs\|LAs\|oA] |
| 4598 | [oGs\|oTs\|o5mCs\|oGs\|5mCs\|dTs\|dTs\|5mCs\|dTs\|dTs\|5mCs\|dTs\|dGs\|5mCs\|oAs\|oGs\|LGs\|oAs\|oA] |
| 4599 | [oGs\|oTs\|o5mCs\|oGs\|5mCs\|dTs\|dTs\|5mCs\|dTs\|dTs\|5mCs\|dTs\|dGs\|5mCs\|oAs\|LGs\|oGs\|oAs\|oA] |
| 4600 | [oTs\|LGs\|oTs\|o5mCs\|oGs\|5mCs\|dTs\|dTs\|5mCs\|dTs\|dTs\|5mCs\|dTs\|dGs\|5mCs\|oAs\|oGs\|oG] |
| 4601 | [oTs\|oGs\|LTs\|o5mCs\|oGs\|5mCs\|dTs\|dTs\|5mCs\|dTs\|dTs\|5mCs\|dTs\|dGs\|5mCs\|oAs\|oGs\|oG] |
| 4602 | [oTs\|oGs\|oTs\|L5mCs\|oGs\|5mCs\|dTs\|dTs\|5mCs\|dTs\|dTs\|5mCs\|dTs\|dGs\|5mCs\|oAs\|oGs\|oG] |
| 4603 | [oTs\|o5mCs\|oGs\|5mCs\|dTs\|dTs\|5mCs\|dTs\|dTs\|5mCs\|dTs\|dGs\|5mCs\|oAs\|oGs\|oGs\|LAs\|oA] |
| 4604 | [oTs\|o5mCs\|oGs\|5mCs\|dTs\|dTs\|5mCs\|dTs\|dTs\|5mCs\|dTs\|dGs\|5mCs\|oAs\|oGs\|LGs\|oAs\|oA] |
| 4605 | [oTs\|o5mCs\|oGs\|5mCs\|dTs\|dTs\|5mCs\|dTs\|dTs\|5mCs\|dTs\|dGs\|5mCs\|oAs\|LGs\|oGs\|oAs\|oA] |
| 4606 | [oTs\|LGs\|oTs\|o5mCs\|oGs\|5mCs\|dTs\|dTs\|5mCs\|dTs\|dTs\|5mCs\|dTs\|dGs\|5mCs\|oAs\|oG] |
| 4607 | [oTs\|oGs\|LTs\|o5mCs\|oGs\|5mCs\|dTs\|dTs\|5mCs\|dTs\|dTs\|5mCs\|dTs\|dGs\|5mCs\|oAs\|oG] |
| 4608 | [oTs\|oGs\|oTs\|L5mCs\|oGs\|5mCs\|dTs\|dTs\|5mCs\|dTs\|dTs\|5mCs\|dTs\|dGs\|5mCs\|oAs\|oG] |
| 4609 | [o5mCs\|oGs\|5mCs\|dTs\|dTs\|5mCs\|dTs\|dTs\|5mCs\|dTs\|dGs\|5mCs\|oAs\|oGs\|oGs\|LAs\|oA] |
| 4610 | [o5mCs\|oGs\|5mCs\|dTs\|dTs\|5mCs\|dTs\|dTs\|5mCs\|dTs\|dGs\|5mCs\|oAs\|oGs\|LGs\|oAs\|oA] |
| 4611 | [o5mCs\|oGs\|5mCs\|dTs\|dTs\|5mCs\|dTs\|dTs\|5mCs\|dTs\|dGs\|5mCs\|oAs\|LGs\|oGs\|oAs\|oA] |
| 4612 | [oGs\|LTs\|o5mCs\|oGs\|5mCs\|dTs\|dTs\|5mCs\|dTs\|dTs\|5mCs\|dTs\|dGs\|5mCs\|oAs\|oGs\|oGs\|oAs\|oA] |
| 4613 | [oGs\|oTs\|L5mCs\|oGs\|5mCs\|dTs\|dTs\|5mCs\|dTs\|dTs\|5mCs\|dTs\|dGs\|5mCs\|oAs\|oGs\|oGs\|oAs\|oA] |
| 4614 | [oTs\|oGs\|oTs\|o5mCs\|oGs\|5mCs\|dTs\|dTs\|5mCs\|dTs\|dTs\|5mCs\|dTs\|dGs\|5mCs\|oAs\|oGs\|LGs\|oA] |
| 4615 | [oTs\|oGs\|oTs\|o5mCs\|oGs\|5mCs\|dTs\|dTs\|5mCs\|dTs\|dTs\|5mCs\|dTs\|dGs\|5mCs\|oAs\|LGs\|oGs\|oA] |
| 4616 | [oGs\|LTs\|o5mCs\|oGs\|5mCs\|dTs\|dTs\|5mCs\|dTs\|dTs\|5mCs\|dTs\|dGs\|5mCs\|oAs\|oGs\|oGs\|oA] |
| 4617 | [oGs\|oTs\|L5mCs\|oGs\|5mCs\|dTs\|dTs\|5mCs\|dTs\|dTs\|5mCs\|dTs\|dGs\|5mCs\|oAs\|oGs\|oGs\|oA] |
| 4618 | [oGs\|oTs\|o5mCs\|oGs\|5mCs\|dTs\|dTs\|5mCs\|dTs\|dTs\|5mCs\|dTs\|dGs\|5mCs\|oAs\|oGs\|LGs\|oA] |
| 4619 | [oGs\|oTs\|o5mCs\|oGs\|5mCs\|dTs\|dTs\|5mCs\|dTs\|dTs\|5mCs\|dTs\|dGs\|5mCs\|oAs\|LGs\|oGs\|oA] |
| 4620 | [oGs\|LTs\|o5mCs\|oGs\|5mCs\|dTs\|dTs\|5mCs\|dTs\|dTs\|5mCs\|dTs\|dGs\|5mCs\|oAs\|oGs\|oG] |
| 4621 | [oGs\|oTs\|L5mCs\|oGs\|5mCs\|dTs\|dTs\|5mCs\|dTs\|dTs\|5mCs\|dTs\|dGs\|5mCs\|oAs\|oGs\|oG] |
| 4622 | [oGs\|oTs\|o5mCs\|oGs\|5mCs\|dTs\|dTs\|5mCs\|dTs\|dTs\|5mCs\|dTs\|dGs\|5mCs\|oAs\|LGs\|oG] |
| 4623 | [oTs\|oGs\|oTs\|o5mCs\|oGs\|o5mCs\|oTs\|oTs\|5mCs\|dTs\|dTs\|5mCs\|dTs\|dGs\|5mCs\|dAs\|dGs\|dGs\|oAs\|oA] |
| 4624 | [oTs\|oGs\|dTs\|5mCs\|dGs\|5mCs\|dTs\|dTs\|5mCs\|dTs\|dTs\|5mCs\|oTs\|oGs\|o5mCs\|oAs\|oGs\|oGs\|oAs\|oA] |
| 4625 | [oTs\|oGs\|oTs\|o5mCs\|oGs\|o5mCs\|oTs\|dTs\|5mCs\|dTs\|dTs\|5mCs\|dTs\|dGs\|5mCs\|dAs\|dGs\|oGs\|oAs\|oA] |
| 4626 | [oTs\|oGs\|oTs\|5mCs\|dGs\|5mCs\|dTs\|dTs\|5mCs\|dTs\|dTs\|5mCs\|dTs\|oGs\|o5mCs\|oAs\|oGs\|oGs\|oAs\|oA] |
| 4627 | [oTs\|oGs\|oTs\|o5mCs\|oGs\|o5mCs\|oTs\|dTs\|5mCs\|dTs\|dTs\|5mCs\|dTs\|dGs\|5mCs\|dAs\|dGs\|oGs\|oA] |
| 4628 | [oGs\|oTs\|5mCs\|dGs\|5mCs\|dTs\|dTs\|5mCs\|dTs\|dTs\|5mCs\|dTs\|oGs\|o5mCs\|oAs\|oGs\|oGs\|oAs\|oA] |
| 4629 | [oTs\|oGs\|oTs\|o5mCs\|oGs\|o5mCs\|dTs\|dTs\|5mCs\|dTs\|dTs\|5mCs\|dTs\|dGs\|5mCs\|dAs\|oGs\|oGs\|oAs\|oA] |
| 4630 | [oTs\|oGs\|oTs\|o5mCs\|dGs\|5mCs\|dTs\|dTs\|5mCs\|dTs\|dTs\|5mCs\|dTs\|dGs\|o5mCs\|oAs\|oGs\|oGs\|oAs\|oA] |
| 4631 | [oTs\|oGs\|oTs\|o5mCs\|oGs\|o5mCs\|dTs\|dTs\|5mCs\|dTs\|dTs\|5mCs\|dTs\|dGs\|5mCs\|dAs\|oGs\|oGs\|oA] |
| 4632 | [oTs\|oGs\|oTs\|5mCs\|dGs\|5mCs\|dTs\|dTs\|5mCs\|dTs\|dTs\|5mCs\|dTs\|dGs\|o5mCs\|oAs\|oGs\|oGs\|oAs\|oA] |
| 4633 | [oTs\|oGs\|oTs\|o5mCs\|oGs\|o5mCs\|dTs\|dTs\|5mCs\|dTs\|dTs\|5mCs\|dTs\|dGs\|5mCs\|dAs\|oGs\|oG] |
| 4634 | [oTs\|o5mCs\|dGs\|5mCs\|dTs\|dTs\|5mCs\|dTs\|dTs\|5mCs\|dTs\|dGs\|o5mCs\|oAs\|oGs\|oGs\|oAs\|oA] |
| 4635 | [oTs\|oGs\|oTs\|o5mCs\|oGs\|5mCs\|dTs\|dTs\|5mCs\|dTs\|dTs\|5mCs\|dTs\|dGs\|5mCs\|oAs\|oGs\|oGs\|oAs\|oA] |
| 4636 | [oTs\|oGs\|oTs\|o5mCs\|oGs\|5mCs\|dTs\|dTs\|5mCs\|dTs\|dTs\|5mCs\|dTs\|dGs\|5mCs\|oAs\|oGs\|oGs\|oA] |
| 4637 | [oTs\|oGs\|oTs\|o5mCs\|oGs\|5mCs\|dTs\|dTs\|5mCs\|dTs\|dTs\|5mCs\|dTs\|dGs\|5mCs\|oAs\|oGs\|oG] |
| 4638 | [oTs\|o5mCs\|oGs\|5mCs\|dTs\|dTs\|5mCs\|dTs\|dTs\|5mCs\|dTs\|dGs\|5mCs\|oAs\|oGs\|oGs\|oAs\|oA] |
| 4639 | [oTs\|oGs\|oTs\|o5mCs\|oGs\|5mCs\|dTs\|dTs\|5mCs\|dTs\|dTs\|5mCs\|dTs\|dGs\|5mCs\|oAs\|oG] |
| 4640 | [o5mCs\|oGs\|5mCs\|dTs\|dTs\|5mCs\|dTs\|dTs\|5mCs\|dTs\|dGs\|5mCs\|oAs\|oGs\|oGs\|oAs\|oA] |
| 4641 | [oGs\|oTs\|o5mCs\|oGs\|5mCs\|dTs\|dTs\|5mCs\|dTs\|dTs\|5mCs\|dTs\|dGs\|5mCs\|oAs\|oGs\|oGs\|oAs\|oA] |
| 4642 | [oGs\|oTs\|o5mCs\|oGs\|5mCs\|dTs\|dTs\|5mCs\|dTs\|dTs\|5mCs\|dTs\|dGs\|5mCs\|oAs\|oGs\|oGs\|oA] |
| 4643 | [oGs\|oTs\|o5mCs\|oGs\|5mCs\|dTs\|dTs\|5mCs\|dTs\|dTs\|5mCs\|dTs\|dGs\|5mCs\|oAs\|oGs\|oG] |
| 4644 | [oTs\|oGs\|oTp\|o5mCs\|oGs\|5mCs\|dTs\|dTs\|5mCs\|dTs\|dTs\|5mCs\|dTs\|dGs\|5mCs\|oAs\|oGs\|oGs\|oAs\|oA] |
| 4645 | [oTs\|oGs\|oTs\|o5mCp\|oGs\|5mCs\|dTs\|dTs\|5mCs\|dTs\|dTs\|5mCs\|dTs\|dGs\|5mCs\|oAs\|oGs\|oGs\|oAs\|oA] |
| 4646 | [oTs\|oGs\|oTp\|o5mCp\|oGs\|5mCs\|dTs\|dTs\|5mCs\|dTs\|dTs\|5mCs\|dTs\|dGs\|5mCs\|oAs\|oGs\|oGs\|oAs\|oA] |
| 4647 | [oTs\|oGs\|oTs\|o5mCs\|oGs\|5mCs\|dTs\|dTs\|5mCs\|dTs\|dTs\|5mCs\|dTs\|dGs\|5mCs\|oAs\|oGp\|oGs\|oAs\|oA] |
| 4648 | [oTs\|oGs\|oTs\|o5mCs\|oGs\|5mCs\|dTs\|dTs\|5mCs\|dTs\|dTs\|5mCs\|dTs\|dGs\|5mCs\|oAp\|oGs\|oGs\|oAs\|oA] |
| 4649 | [oTs\|oGs\|oTs\|o5mCs\|oGs\|5mCs\|dTs\|dTs\|5mCs\|dTs\|dTs\|5mCs\|dTs\|dGs\|5mCs\|oAp\|oGp\|oGs\|oAs\|oA] |
| 4650 | [oTs\|oGs\|oTp\|o5mCs\|oGs\|5mCs\|dTs\|dTs\|5mCs\|dTs\|dTs\|5mCs\|dTs\|dGs\|5mCs\|oAs\|oGp\|oGs\|oAs\|oA] |
| 4651 | [oTs\|oGs\|oTp\|o5mCs\|oGs\|5mCs\|dTs\|dTs\|5mCs\|dTs\|dTs\|5mCs\|dTs\|dGs\|5mCs\|oAp\|oGs\|oGs\|oAs\|oA] |
| 4652 | [oTs\|oGs\|oTs\|o5mCp\|oGs\|5mCs\|dTs\|dTs\|5mCs\|dTs\|dTs\|5mCs\|dTs\|dGs\|5mCs\|oAs\|oGp\|oGs\|oAs\|oA] |
| 4653 | [oTs\|oGs\|oTs\|o5mCp\|oGs\|5mCs\|dTs\|dTs\|5mCs\|dTs\|dTs\|5mCs\|dTs\|dGs\|5mCs\|oAp\|oGs\|oGs\|oAs\|oA] |
| 4654 | [oTs\|oGs\|oTp\|o5mCs\|oGs\|5mCs\|dTs\|dTs\|5mCs\|dTs\|dTs\|5mCs\|dTs\|dGs\|5mCs\|oAp\|oGp\|oGs\|oAs\|oA] |
| 4655 | [oTs\|oGs\|oTs\|o5mCp\|oGs\|5mCs\|dTs\|dTs\|5mCs\|dTs\|dTs\|5mCs\|dTs\|dGs\|5mCs\|oAp\|oGp\|oGs\|oAs\|oA] |
| 4656 | [oTs\|oGs\|oTp\|o5mCp\|oGs\|5mCs\|dTs\|dTs\|5mCs\|dTs\|dTs\|5mCs\|dTs\|dGs\|5mCs\|oAs\|oGp\|oGs\|oAs\|oA] |
| 4657 | [oTs\|oGs\|oTp\|o5mCp\|oGs\|5mCs\|dTs\|dTs\|5mCs\|dTs\|dTs\|5mCs\|dTs\|dGs\|5mCs\|oAp\|oGs\|oGs\|oAs\|oA] |
| 4658 | [oTs\|oGs\|oTp\|o5mCp\|oGs\|5mCs\|dTs\|dTs\|5mCs\|dTs\|dTs\|5mCs\|dTs\|dGs\|5mCs\|oAp\|oGp\|oGs\|oAs\|oA] |
| 4659 | [oTs\|oGs\|oTs\|o5mCs\|oGs\|5mCs\|dTs\|dTs\|5mCs\|dTs\|dTs\|5mCs\|dTs\|dGs\|5mCs\|oAs\|oGs\|oGs\|oAs\|oAs\|o5mC] |
| 4660 | [oTs\|oGs\|oTp\|o5mCs\|oGs\|5mCs\|dTs\|dTs\|5mCs\|dTs\|dTs\|5mCs\|dTs\|dGs\|5mCs\|oAs\|oGs\|oGs\|oAs\|oAs\|o5mC] |
| 4661 | [oTs\|oGs\|oTs\|o5mCp\|oGs\|5mCs\|dTs\|dTs\|5mCs\|dTs\|dTs\|5mCs\|dTs\|dGs\|5mCs\|oAs\|oGs\|oGs\|oAs\|oAs\|o5mC] |
| 4662 | [oTs\|oGs\|oTp\|o5mCp\|oGs\|5mCs\|dTs\|dTs\|5mCs\|dTs\|dTs\|5mCs\|dTs\|dGs\|5mCs\|oAs\|oGs\|oGs\|oAs\|oAs\|o5mC] |
| 4663 | [oTs\|oGs\|oTs\|o5mCs\|oGs\|5mCs\|dTs\|dTs\|5mCs\|dTs\|dTs\|5mCs\|dTs\|dGs\|5mCs\|oAs\|oGp\|oGs\|oAs\|oAs\|o5mC] |
| 4664 | [oTs\|oGs\|oTs\|o5mCs\|oGs\|5mCs\|dTs\|dTs\|5mCs\|dTs\|dTs\|5mCs\|dTs\|dGs\|5mCs\|oAp\|oGs\|oGs\|oAs\|oAs\|o5mC] |
| 4665 | [oTs\|oGs\|oTs\|o5mCs\|oGs\|5mCs\|dTs\|dTs\|5mCs\|dTs\|dTs\|5mCs\|dTs\|dGs\|5mCs\|oAp\|oGp\|oGs\|oAs\|oAs\|o5mC] |
| 4666 | [oTs\|oGs\|oTp\|o5mCs\|oGs\|5mCs\|dTs\|dTs\|5mCs\|dTs\|dTs\|5mCs\|dTs\|dGs\|5mCs\|oAs\|oGp\|oGs\|oAs\|oAs\|o5mC] |
| 4667 | [oTs\|oGs\|oTp\|o5mCs\|oGs\|5mCs\|dTs\|dTs\|5mCs\|dTs\|dTs\|5mCs\|dTs\|dGs\|5mCs\|oAp\|oGs\|oGs\|oAs\|oAs\|o5mC] |
| 4668 | [oTs\|oGs\|oTs\|o5mCp\|oGs\|5mCs\|dTs\|dTs\|5mCs\|dTs\|dTs\|5mCs\|dTs\|dGs\|5mCs\|oAs\|oGp\|oGs\|oAs\|oAs\|o5mC] |
| 4669 | [oTs\|oGs\|oTs\|o5mCp\|oGs\|5mCs\|dTs\|dTs\|5mCs\|dTs\|dTs\|5mCs\|dTs\|dGs\|5mCs\|oAp\|oGs\|oGs\|oAs\|oAs\|o5mC] |
| 4670 | [oTs\|oGs\|oTp\|o5mCs\|oGs\|5mCs\|dTs\|dTs\|5mCs\|dTs\|dTs\|5mCs\|dTs\|dGs\|5mCs\|oAp\|oGp\|oGs\|oAs\|oAs\|o5mC] |
| 4671 | [oTs\|oGs\|oTs\|o5mCp\|oGs\|5mCs\|dTs\|dTs\|5mCs\|dTs\|dTs\|5mCs\|dTs\|dGs\|5mCs\|oAp\|oGp\|oGs\|oAs\|oAs\|o5mC] |
| 4672 | [oTs\|oGs\|oTp\|o5mCp\|oGs\|5mCs\|dTs\|dTs\|5mCs\|dTs\|dTs\|5mCs\|dTs\|dGs\|5mCs\|oAs\|oGp\|oGs\|oAs\|oAs\|o5mC] |
| 4673 | [oTs\|oGs\|oTp\|o5mCp\|oGs\|5mCs\|dTs\|dTs\|5mCs\|dTs\|dTs\|5mCs\|dTs\|dGs\|5mCs\|oAp\|oGs\|oGs\|oAs\|oAs\|o5mC] |
| 4674 | [oTs\|oGs\|oTp\|o5mCp\|oGs\|5mCs\|dTs\|dTs\|5mCs\|dTs\|dTs\|5mCs\|dTs\|dGs\|5mCs\|oAp\|oGp\|oGs\|oAs\|oAs\|o5mC] |
| 4675 | [oTs\|oGs\|oTs\|o5mCs\|oGs\|5mCs\|dTs\|dTs\|5mCs\|dTs\|dTs\|5mCs\|dTs\|dGs\|5mCs\|oAs\|oGs\|oGs\|oAs\|oAs\|o5mCs\|oA] |
| 4676 | [oTs\|oGs\|oTp\|o5mCs\|oGs\|5mCs\|dTs\|dTs\|5mCs\|dTs\|dTs\|5mCs\|dTs\|dGs\|5mCs\|oAs\|oGs\|oGs\|oAs\|oAs\|o5mCs\|oA] |
| 4677 | [oTs\|oGs\|oTs\|o5mCp\|oGs\|5mCs\|dTs\|dTs\|5mCs\|dTs\|dTs\|5mCs\|dTs\|dGs\|5mCs\|oAs\|oGs\|oGs\|oAs\|oAs\|o5mCs\|oA] |
| 4678 | [oTs\|oGs\|oTp\|o5mCp\|oGs\|5mCs\|dTs\|dTs\|5mCs\|dTs\|dTs\|5mCs\|dTs\|dGs\|5mCs\|oAs\|oGs\|oGs\|oAs\|oAs\|o5mCs\|oA] |
| 4679 | [oTs\|oGs\|oTs\|o5mCs\|oGs\|5mCs\|dTs\|dTs\|5mCs\|dTs\|dTs\|5mCs\|dTs\|dGs\|5mCs\|oAs\|oGp\|oGs\|oAs\|oAs\|o5mCs\|oA] |
| 4680 | [oTs\|oGs\|oTs\|o5mCs\|oGs\|5mCs\|dTs\|dTs\|5mCs\|dTs\|dTs\|5mCs\|dTs\|dGs\|5mCs\|oAp\|oGs\|oGs\|oAs\|oAs\|o5mCs\|oA] |
| 4681 | [oTs\|oGs\|oTs\|o5mCs\|oGs\|5mCs\|dTs\|dTs\|5mCs\|dTs\|dTs\|5mCs\|dTs\|dGs\|5mCs\|oAp\|oGp\|oGs\|oAs\|oAs\|o5mCs\|oA] |
| 4682 | [oTs\|oGs\|oTp\|o5mCs\|oGs\|5mCs\|dTs\|dTs\|5mCs\|dTs\|dTs\|5mCs\|dTs\|dGs\|5mCs\|oAs\|oGp\|oGs\|oAs\|oAs\|o5mCs\|oA] |
| 4683 | [oTs\|oGs\|oTp\|o5mCs\|oGs\|5mCs\|dTs\|dTs\|5mCs\|dTs\|dTs\|5mCs\|dTs\|dGs\|5mCs\|oAp\|oGs\|oGs\|oAs\|oAs\|o5mCs\|oA] |
| 4684 | [oTs\|oGs\|oTs\|o5mCp\|oGs\|5mCs\|dTs\|dTs\|5mCs\|dTs\|dTs\|5mCs\|dTs\|dGs\|5mCs\|oAs\|oGp\|oGs\|oAs\|oAs\|o5mCs\|oA] |
| 4685 | [oTs\|oGs\|oTs\|o5mCp\|oGs\|5mCs\|dTs\|dTs\|5mCs\|dTs\|dTs\|5mCs\|dTs\|dGs\|5mCs\|oAp\|oGs\|oGs\|oAs\|oAs\|o5mCs\|oA] |
| 4686 | [oTs\|oGs\|oTp\|o5mCs\|oGs\|5mCs\|dTs\|dTs\|5mCs\|dTs\|dTs\|5mCs\|dTs\|dGs\|5mCs\|oAp\|oGp\|oGs\|oAs\|oAs\|o5mCs\|oA] |
| 4687 | [oTs\|oGs\|oTs\|o5mCp\|oGs\|5mCs\|dTs\|dTs\|5mCs\|dTs\|dTs\|5mCs\|dTs\|dGs\|5mCs\|oAp\|oGp\|oGs\|oAs\|oAs\|o5mCs\|oA] |
| 4688 | [oTs\|oGs\|oTp\|o5mCp\|oGs\|5mCs\|dTs\|dTs\|5mCs\|dTs\|dTs\|5mCs\|dTs\|dGs\|5mCs\|oAs\|oGp\|oGs\|oAs\|oAs\|o5mCs\|oA] |
| 4689 | [oTs\|oGs\|oTp\|o5mCp\|oGs\|5mCs\|dTs\|dTs\|5mCs\|dTs\|dTs\|5mCs\|dTs\|dGs\|5mCs\|oAp\|oGs\|oGs\|oAs\|oAs\|o5mCs\|oA] |
| 4690 | [oTs\|oGs\|oTp\|o5mCp\|oGs\|5mCs\|dTs\|dTs\|5mCs\|dTs\|dTs\|5mCs\|dTs\|dGs\|5mCs\|oAp\|oGp\|oGs\|oAs\|oAs\|o5mCs\|oA] |
| 4691 | [oTs\|oGs\|oTs\|o5mCs\|oGs\|5mCs\|dTs\|dTs\|5mCs\|dTs\|dTs\|5mCs\|dTs\|dGs\|5mCs\|oAs\|oGs\|oGs\|oAs\|oAs\|o5mCs\|oAs\|oT] |
| 4692 | [oTs\|oGs\|oTp\|o5mCs\|oGs\|5mCs\|dTs\|dTs\|5mCs\|dTs\|dTs\|5mCs\|dTs\|dGs\|5mCs\|oAs\|oGs\|oGs\|oAs\|oAs\|o5mCs\|oAs\|oT] |
| 4693 | [oTs\|oGs\|oTs\|o5mCp\|oGs\|5mCs\|dTs\|dTs\|5mCs\|dTs\|dTs\|5mCs\|dTs\|dGs\|5mCs\|oAs\|oGs\|oGs\|oAs\|oAs\|o5mCs\|oAs\|oT] |
| 4694 | [oTs\|oGs\|oTp\|o5mCp\|oGs\|5mCs\|dTs\|dTs\|5mCs\|dTs\|dTs\|5mCs\|dTs\|dGs\|5mCs\|oAs\|oGs\|oGs\|oAs\|oAs\|o5mCs\|oAs\|oT] |
| 4695 | [oTs\|oGs\|oTs\|o5mCs\|oGs\|5mCs\|dTs\|dTs\|5mCs\|dTs\|dTs\|5mCs\|dTs\|dGs\|5mCs\|oAs\|oGp\|oGs\|oAs\|oAs\|o5mCs\|oAs\|oT] |
| 4696 | [oTs\|oGs\|oTs\|o5mCs\|oGs\|5mCs\|dTs\|dTs\|5mCs\|dTs\|dTs\|5mCs\|dTs\|dGs\|5mCs\|oAp\|oGs\|oGs\|oAs\|oAs\|o5mCs\|oAs\|oT] |
| 4697 | [oTs\|oGs\|oTs\|o5mCs\|oGs\|5mCs\|dTs\|dTs\|5mCs\|dTs\|dTs\|5mCs\|dTs\|dGs\|5mCs\|oAp\|oGp\|oGs\|oAs\|oAs\|o5mCs\|oAs\|oT] |
| 4698 | [oTs\|oGs\|oTp\|o5mCs\|oGs\|5mCs\|dTs\|dTs\|5mCs\|dTs\|dTs\|5mCs\|dTs\|dGs\|5mCs\|oAs\|oGp\|oGs\|oAs\|oAs\|o5mCs\|oAs\|oT] |
| 4699 | [oTs\|oGs\|oTp\|o5mCs\|oGs\|5mCs\|dTs\|dTs\|5mCs\|dTs\|dTs\|5mCs\|dTs\|dGs\|5mCs\|oAp\|oGs\|oGs\|oAs\|oAs\|o5mCs\|oAs\|oT] |
| 4700 | [oTs\|oGs\|oTs\|o5mCp\|oGs\|5mCs\|dTs\|dTs\|5mCs\|dTs\|dTs\|5mCs\|dTs\|dGs\|5mCs\|oAs\|oGp\|oGs\|oAs\|oAs\|o5mCs\|oAs\|oT] |
| 4701 | [oTs\|oGs\|oTs\|o5mCp\|oGs\|5mCs\|dTs\|dTs\|5mCs\|dTs\|dTs\|5mCs\|dTs\|dGs\|5mCs\|oAp\|oGs\|oGs\|oAs\|oAs\|o5mCs\|oAs\|oT] |
| 4702 | [oTs\|oGs\|oTp\|o5mCs\|oGs\|5mCs\|dTs\|dTs\|5mCs\|dTs\|dTs\|5mCs\|dTs\|dGs\|5mCs\|oAp\|oGp\|oGs\|oAs\|oAs\|o5mCs\|oAs\|oT] |
| 4703 | [oTs\|oGs\|oTs\|o5mCp\|oGs\|5mCs\|dTs\|dTs\|5mCs\|dTs\|dTs\|5mCs\|dTs\|dGs\|5mCs\|oAp\|oGp\|oGs\|oAs\|oAs\|o5mCs\|oAs\|oT] |
| 4704 | [oTs\|oGs\|oTp\|o5mCp\|oGs\|5mCs\|dTs\|dTs\|5mCs\|dTs\|dTs\|5mCs\|dTs\|dGs\|5mCs\|oAs\|oGp\|oGs\|oAs\|oAs\|o5mCs\|oAs\|oT] |
| 4705 | [oTs\|oGs\|oTp\|o5mCp\|oGs\|5mCs\|dTs\|dTs\|5mCs\|dTs\|dTs\|5mCs\|dTs\|dGs\|5mCs\|oAp\|oGs\|oGs\|oAs\|oAs\|o5mCs\|oAs\|oT] |
| 4706 | [oTs\|oGs\|oTp\|o5mCp\|oGs\|5mCs\|dTs\|dTs\|5mCs\|dTs\|dTs\|5mCs\|dTs\|dGs\|5mCs\|oAp\|oGp\|oGs\|oAs\|oAs\|o5mCs\|oAs\|oT] |
| 4707 | [oTs\|oGs\|oTs\|o5mCs\|oGs\|5mCs\|dTs\|dTs\|5mCs\|dTs\|dTs\|5mCs\|dTs\|dGs\|5mCs\|dAs\|oGs\|oGs\|oAs\|oAs\|o5mC] |
| 4708 | [oTs\|oGs\|oTp\|o5mCs\|oGs\|5mCs\|dTs\|dTs\|5mCs\|dTs\|dTs\|5mCs\|dTs\|dGs\|5mCs\|dAs\|oGs\|oGs\|oAs\|oAs\|o5mC] |
| 4709 | [oTs\|oGs\|oTs\|o5mCp\|oGs\|5mCs\|dTs\|dTs\|5mCs\|dTs\|dTs\|5mCs\|dTs\|dGs\|5mCs\|dAs\|oGs\|oGs\|oAs\|oAs\|o5mC] |
| 4710 | [oTs\|oGs\|oTp\|o5mCp\|oGs\|5mCs\|dTs\|dTs\|5mCs\|dTs\|dTs\|5mCs\|dTs\|dGs\|5mCs\|dAs\|oGs\|oGs\|oAs\|oAs\|o5mC] |
| 4711 | [oTs\|oGs\|oTs\|o5mCs\|oGs\|5mCs\|dTs\|dTs\|5mCs\|dTs\|dTs\|5mCs\|dTs\|dGs\|5mCs\|dAs\|oGp\|oGs\|oAs\|oAs\|o5mC] |
| 4712 | [oTs\|oGs\|oTs\|o5mCs\|oGs\|5mCs\|dTs\|dTs\|5mCs\|dTs\|dTs\|5mCs\|dTs\|dGs\|5mCs\|dAp\|oGs\|oGs\|oAs\|oAs\|o5mC] |
| 4713 | [oTs\|oGs\|oTs\|o5mCs\|oGs\|5mCs\|dTs\|dTs\|5mCs\|dTs\|dTs\|5mCs\|dTs\|dGs\|5mCs\|dAp\|oGp\|oGs\|oAs\|oAs\|o5mC] |
| 4714 | [oTs\|oGs\|oTp\|o5mCs\|oGs\|5mCs\|dTs\|dTs\|5mCs\|dTs\|dTs\|5mCs\|dTs\|dGs\|5mCs\|dAs\|oGp\|oGs\|oAs\|oAs\|o5mC] |
| 4715 | [oTs\|oGs\|oTp\|o5mCs\|oGs\|5mCs\|dTs\|dTs\|5mCs\|dTs\|dTs\|5mCs\|dTs\|dGs\|5mCs\|dAp\|oGs\|oGs\|oAs\|oAs\|o5mC] |
| 4716 | [oTs\|oGs\|oTs\|o5mCp\|oGs\|5mCs\|dTs\|dTs\|5mCs\|dTs\|dTs\|5mCs\|dTs\|dGs\|5mCs\|dAs\|oGp\|oGs\|oAs\|oAs\|o5mC] |
| 4717 | [oTs\|oGs\|oTs\|o5mCp\|oGs\|5mCs\|dTs\|dTs\|5mCs\|dTs\|dTs\|5mCs\|dTs\|dGs\|5mCs\|dAp\|oGs\|oGs\|oAs\|oAs\|o5mC] |
| 4718 | [oTs\|oGs\|oTp\|o5mCs\|oGs\|5mCs\|dTs\|dTs\|5mCs\|dTs\|dTs\|5mCs\|dTs\|dGs\|5mCs\|dAp\|oGp\|oGs\|oAs\|oAs\|o5mC] |
| 4719 | [oTs\|oGs\|oTs\|o5mCp\|oGs\|5mCs\|dTs\|dTs\|5mCs\|dTs\|dTs\|5mCs\|dTs\|dGs\|5mCs\|dAp\|oGp\|oGs\|oAs\|oAs\|o5mC] |
| 4720 | [oTs\|oGs\|oTp\|o5mCp\|oGs\|5mCs\|dTs\|dTs\|5mCs\|dTs\|dTs\|5mCs\|dTs\|dGs\|5mCs\|dAs\|oGp\|oGs\|oAs\|oAs\|o5mC] |
| 4721 | [oTs\|oGs\|oTp\|o5mCp\|oGs\|5mCs\|dTs\|dTs\|5mCs\|dTs\|dTs\|5mCs\|dTs\|dGs\|5mCs\|dAp\|oGs\|oGs\|oAs\|oAs\|o5mC] |
| 4722 | [oTs\|oGs\|oTp\|o5mCp\|oGs\|5mCs\|dTs\|dTs\|5mCs\|dTs\|dTs\|5mCs\|dTs\|dGs\|5mCs\|dAp\|oGp\|oGs\|oAs\|oAs\|o5mC] |
| 4723 | [oTs\|oGs\|oTs\|o5mCs\|oGs\|5mCs\|dTs\|dTs\|5mCs\|dTs\|dTs\|5mCs\|dTs\|dGs\|5mCs\|dAs\|dGs\|oGs\|oAs\|oAs\|o5mCs\|oA] |
| 4724 | [oTs\|oGs\|oTp\|o5mCs\|oGs\|5mCs\|dTs\|dTs\|5mCs\|dTs\|dTs\|5mCs\|dTs\|dGs\|5mCs\|dAs\|dGs\|oGs\|oAs\|oAs\|o5mCs\|oA] |
| 4725 | [oTs\|oGs\|oTs\|o5mCp\|oGs\|5mCs\|dTs\|dTs\|5mCs\|dTs\|dTs\|5mCs\|dTs\|dGs\|5mCs\|dAs\|dGs\|oGs\|oAs\|oAs\|o5mCs\|oA] |
| 4726 | [oTs\|oGs\|oTp\|o5mCp\|oGs\|5mCs\|dTs\|dTs\|5mCs\|dTs\|dTs\|5mCs\|dTs\|dGs\|5mCs\|dAs\|dGs\|oGs\|oAs\|oAs\|o5mCs\|oA] |
| 4727 | [oTs\|oGs\|oTs\|o5mCs\|oGs\|5mCs\|dTs\|dTs\|5mCs\|dTs\|dTs\|5mCs\|dTs\|dGs\|5mCs\|dAs\|dGp\|oGs\|oAs\|oAs\|o5mCs\|oA] |
| 4728 | [oTs\|oGs\|oTs\|o5mCs\|oGs\|5mCs\|dTs\|dTs\|5mCs\|dTs\|dTs\|5mCs\|dTs\|dGs\|5mCs\|dAp\|dGs\|oGs\|oAs\|oAs\|o5mCs\|oA] |
| 4729 | [oTs\|oGs\|oTs\|o5mCs\|oGs\|5mCs\|dTs\|dTs\|5mCs\|dTs\|dTs\|5mCs\|dTs\|dGs\|5mCs\|dAp\|dGp\|oGs\|oAs\|oAs\|o5mCs\|oA] |
| 4730 | [oTs\|oGs\|oTp\|o5mCs\|oGs\|5mCs\|dTs\|dTs\|5mCs\|dTs\|dTs\|5mCs\|dTs\|dGs\|5mCs\|dAs\|dGp\|oGs\|oAs\|oAs\|o5mCs\|oA] |
| 4731 | [oTs\|oGs\|oTp\|o5mCs\|oGs\|5mCs\|dTs\|dTs\|5mCs\|dTs\|dTs\|5mCs\|dTs\|dGs\|5mCs\|dAp\|dGs\|oGs\|oAs\|oAs\|o5mCs\|oA] |
| 4732 | [oTs\|oGs\|oTs\|o5mCp\|oGs\|5mCs\|dTs\|dTs\|5mCs\|dTs\|dTs\|5mCs\|dTs\|dGs\|5mCs\|dAs\|dGp\|oGs\|oAs\|oAs\|o5mCs\|oA] |
| 4733 | [oTs\|oGs\|oTs\|o5mCp\|oGs\|5mCs\|dTs\|dTs\|5mCs\|dTs\|dTs\|5mCs\|dTs\|dGs\|5mCs\|dAp\|dGs\|oGs\|oAs\|oAs\|o5mCs\|oA] |
| 4734 | [oTs\|oGs\|oTp\|o5mCs\|oGs\|5mCs\|dTs\|dTs\|5mCs\|dTs\|dTs\|5mCs\|dTs\|dGs\|5mCs\|dAp\|dGp\|oGs\|oAs\|oAs\|o5mCs\|oA] |
| 4735 | [oTs\|oGs\|oTs\|o5mCp\|oGs\|5mCs\|dTs\|dTs\|5mCs\|dTs\|dTs\|5mCs\|dTs\|dGs\|5mCs\|dAp\|dGp\|oGs\|oAs\|oAs\|o5mCs\|oA] |
| 4736 | [oTs\|oGs\|oTp\|o5mCp\|oGs\|5mCs\|dTs\|dTs\|5mCs\|dTs\|dTs\|5mCs\|dTs\|dGs\|5mCs\|dAs\|dGp\|oGs\|oAs\|oAs\|o5mCs\|oA] |
| 4737 | [oTs\|oGs\|oTp\|o5mCp\|oGs\|5mCs\|dTs\|dTs\|5mCs\|dTs\|dTs\|5mCs\|dTs\|dGs\|5mCs\|dAp\|dGs\|oGs\|oAs\|oAs\|o5mCs\|oA] |
| 4738 | [oTs\|oGs\|oTp\|o5mCp\|oGs\|5mCs\|dTs\|dTs\|5mCs\|dTs\|dTs\|5mCs\|dTs\|dGs\|5mCs\|dAp\|dGp\|oGs\|oAs\|oAs\|o5mCs\|oA] |
| 4739 | [oTs\|LTs\|oGs\|oTs\|o5mCs\|oGs\|o5mCs\|oTs\|dTs\|5mCs\|dTs\|dTs\|5mCs\|dTs\|dGs\|5mCs\|dAs\|dGs\|oGs\|oA] |
| 4740 | [oTs\|oTs\|LGs\|oTs\|o5mCs\|oGs\|o5mCs\|oTs\|dTs\|5mCs\|dTs\|dTs\|5mCs\|dTs\|dGs\|5mCs\|dAs\|dGs\|oGs\|oA] |
| 4741 | [oTs\|oTs\|oGs\|LTs\|o5mCs\|oGs\|o5mCs\|oTs\|dTs\|5mCs\|dTs\|dTs\|5mCs\|dTs\|dGs\|5mCs\|dAs\|dGs\|oGs\|oA] |
| 4742 | [oTs\|oTs\|oGs\|oTs\|L5mCs\|oGs\|o5mCs\|oTs\|dTs\|5mCs\|dTs\|dTs\|5mCs\|dTs\|dGs\|5mCs\|dAs\|dGs\|oGs\|oA] |
| 4743 | [oTs\|oTs\|oGs\|oTs\|o5mCs\|LGs\|o5mCs\|oTs\|dTs\|5mCs\|dTs\|dTs\|5mCs\|dTs\|dGs\|5mCs\|dAs\|dGs\|oGs\|oA] |
| 4744 | [oTs\|oTs\|oGs\|oTs\|o5mCs\|oGs\|L5mCs\|oTs\|dTs\|5mCs\|dTs\|dTs\|5mCs\|dTs\|dGs\|5mCs\|dAs\|dGs\|oGs\|oA] |
| 4745 | [oTs\|oTs\|dGs\|dTs\|5mCs\|dGs\|5mCs\|dTs\|dTs\|5mCs\|dTs\|dTs\|o5mCs\|oTs\|oGs\|o5mCs\|oAs\|oGs\|LGs\|oA] |
| 4746 | [oTs\|oTs\|dGs\|dTs\|5mCs\|dGs\|5mCs\|dTs\|dTs\|5mCs\|dTs\|dTs\|o5mCs\|oTs\|oGs\|o5mCs\|oAs\|LGs\|oGs\|oA] |
| 4747 | [oTs\|oTs\|dGs\|dTs\|5mCs\|dGs\|5mCs\|dTs\|dTs\|5mCs\|dTs\|dTs\|o5mCs\|oTs\|oGs\|o5mCs\|LAs\|oGs\|oGs\|oA] |
| 4748 | [oTs\|oTs\|dGs\|dTs\|5mCs\|dGs\|5mCs\|dTs\|dTs\|5mCs\|dTs\|dTs\|o5mCs\|oTs\|oGs\|L5mCs\|oAs\|oGs\|oGs\|oA] |
| 4749 | [oTs\|oTs\|dGs\|dTs\|5mCs\|dGs\|5mCs\|dTs\|dTs\|5mCs\|dTs\|dTs\|o5mCs\|oTs\|LGs\|o5mCs\|oAs\|oGs\|oGs\|oA] |
| 4750 | [oTs\|oTs\|dGs\|dTs\|5mCs\|dGs\|5mCs\|dTs\|dTs\|5mCs\|dTs\|dTs\|o5mCs\|LTs\|oGs\|o5mCs\|oAs\|oGs\|oGs\|oA] |
| 4751 | [oTs\|LTs\|oGs\|oTs\|o5mCs\|oGs\|o5mCs\|dTs\|dTs\|5mCs\|dTs\|dTs\|5mCs\|dTs\|dGs\|5mCs\|dAs\|oGs\|oGs\|oA] |
| 4752 | [oTs\|oTs\|LGs\|oTs\|o5mCs\|oGs\|o5mCs\|dTs\|dTs\|5mCs\|dTs\|dTs\|5mCs\|dTs\|dGs\|5mCs\|dAs\|oGs\|oGs\|oA] |
| 4753 | [oTs\|oTs\|oGs\|LTs\|o5mCs\|oGs\|o5mCs\|dTs\|dTs\|5mCs\|dTs\|dTs\|5mCs\|dTs\|dGs\|5mCs\|dAs\|oGs\|oGs\|oA] |
| 4754 | [oTs\|oTs\|oGs\|oTs\|L5mCs\|oGs\|o5mCs\|dTs\|dTs\|5mCs\|dTs\|dTs\|5mCs\|dTs\|dGs\|5mCs\|dAs\|oGs\|oGs\|oA] |
| 4755 | [oTs\|oTs\|oGs\|oTs\|o5mCs\|LGs\|o5mCs\|dTs\|dTs\|5mCs\|dTs\|dTs\|5mCs\|dTs\|dGs\|5mCs\|dAs\|oGs\|oGs\|oA] |
| 4756 | [oTs\|oTs\|oGs\|dTs\|5mCs\|dGs\|5mCs\|dTs\|dTs\|5mCs\|dTs\|dTs\|5mCs\|oTs\|oGs\|o5mCs\|oAs\|oGs\|LGs\|oA] |
| 4757 | [oTs\|oTs\|oGs\|dTs\|5mCs\|dGs\|5mCs\|dTs\|dTs\|5mCs\|dTs\|dTs\|5mCs\|oTs\|oGs\|o5mCs\|oAs\|LGs\|oGs\|oA] |
| 4758 | [oTs\|oTs\|oGs\|dTs\|5mCs\|dGs\|5mCs\|dTs\|dTs\|5mCs\|dTs\|dTs\|5mCs\|oTs\|oGs\|o5mCs\|LAs\|oGs\|oGs\|oA] |
| 4759 | [oTs\|oTs\|oGs\|dTs\|5mCs\|dGs\|5mCs\|dTs\|dTs\|5mCs\|dTs\|dTs\|5mCs\|oTs\|oGs\|L5mCs\|oAs\|oGs\|oGs\|oA] |
| 4760 | [oTs\|oTs\|oGs\|dTs\|5mCs\|dGs\|5mCs\|dTs\|dTs\|5mCs\|dTs\|dTs\|5mCs\|oTs\|LGs\|o5mCs\|oAs\|oGs\|oGs\|oA] |
| 4761 | [oTs\|LTs\|oGs\|oTs\|o5mCs\|oGs\|o5mCs\|dTs\|dTs\|5mCs\|dTs\|dTs\|5mCs\|dTs\|dGs\|5mCs\|dAs\|oGs\|oG] |
| 4762 | [oTs\|oTs\|LGs\|oTs\|o5mCs\|oGs\|o5mCs\|dTs\|dTs\|5mCs\|dTs\|dTs\|5mCs\|dTs\|dGs\|5mCs\|dAs\|oGs\|oG] |
| 4763 | [oTs\|oTs\|oGs\|LTs\|o5mCs\|oGs\|o5mCs\|dTs\|dTs\|5mCs\|dTs\|dTs\|5mCs\|dTs\|dGs\|5mCs\|dAs\|oGs\|oG] |
| 4764 | [oTs\|oTs\|oGs\|oTs\|L5mCs\|oGs\|o5mCs\|dTs\|dTs\|5mCs\|dTs\|dTs\|5mCs\|dTs\|dGs\|5mCs\|dAs\|oGs\|oG] |
| 4765 | [oTs\|oTs\|oGs\|oTs\|o5mCs\|LGs\|o5mCs\|dTs\|dTs\|5mCs\|dTs\|dTs\|5mCs\|dTs\|dGs\|5mCs\|dAs\|oGs\|oG] |
| 4766 | [oTs\|oGs\|dTs\|5mCs\|dGs\|5mCs\|dTs\|dTs\|5mCs\|dTs\|dTs\|5mCs\|oTs\|oGs\|o5mCs\|oAs\|oGs\|LGs\|oA] |
| 4767 | [oTs\|oGs\|dTs\|5mCs\|dGs\|5mCs\|dTs\|dTs\|5mCs\|dTs\|dTs\|5mCs\|oTs\|oGs\|o5mCs\|oAs\|LGs\|oGs\|oA] |
| 4768 | [oTs\|oGs\|dTs\|5mCs\|dGs\|5mCs\|dTs\|dTs\|5mCs\|dTs\|dTs\|5mCs\|oTs\|oGs\|o5mCs\|LAs\|oGs\|oGs\|oA] |
| 4769 | [oTs\|oGs\|dTs\|5mCs\|dGs\|5mCs\|dTs\|dTs\|5mCs\|dTs\|dTs\|5mCs\|oTs\|oGs\|L5mCs\|oAs\|oGs\|oGs\|oA] |
| 4770 | [oTs\|oGs\|dTs\|5mCs\|dGs\|5mCs\|dTs\|dTs\|5mCs\|dTs\|dTs\|5mCs\|oTs\|LGs\|o5mCs\|oAs\|oGs\|oGs\|oA] |
| 4771 | [oTs\|LTs\|oGs\|oTs\|o5mCs\|oGs\|5mCs\|dTs\|dTs\|5mCs\|dTs\|dTs\|5mCs\|dTs\|dGs\|5mCs\|oAs\|oGs\|oGs\|oA] |
| 4772 | [oTs\|oTs\|LGs\|oTs\|o5mCs\|oGs\|5mCs\|dTs\|dTs\|5mCs\|dTs\|dTs\|5mCs\|dTs\|dGs\|5mCs\|oAs\|oGs\|oGs\|oA] |
| 4773 | [oTs\|oTs\|oGs\|LTs\|o5mCs\|oGs\|5mCs\|dTs\|dTs\|5mCs\|dTs\|dTs\|5mCs\|dTs\|dGs\|5mCs\|oAs\|oGs\|oGs\|oA] |
| 4774 | [oTs\|oTs\|oGs\|oTs\|L5mCs\|oGs\|5mCs\|dTs\|dTs\|5mCs\|dTs\|dTs\|5mCs\|dTs\|dGs\|5mCs\|oAs\|oGs\|oGs\|oA] |
| 4775 | [oTs\|oTs\|oGs\|oTs\|5mCs\|dGs\|5mCs\|dTs\|dTs\|5mCs\|dTs\|dTs\|5mCs\|dTs\|oGs\|o5mCs\|oAs\|oGs\|LGs\|oA] |
| 4776 | [oTs\|oTs\|oGs\|oTs\|5mCs\|dGs\|5mCs\|dTs\|dTs\|5mCs\|dTs\|dTs\|5mCs\|dTs\|oGs\|o5mCs\|oAs\|LGs\|oGs\|oA] |
| 4777 | [oTs\|oTs\|oGs\|oTs\|5mCs\|dGs\|5mCs\|dTs\|dTs\|5mCs\|dTs\|dTs\|5mCs\|dTs\|oGs\|o5mCs\|LAs\|oGs\|oGs\|oA] |
| 4778 | [oTs\|oTs\|oGs\|oTs\|5mCs\|dGs\|5mCs\|dTs\|dTs\|5mCs\|dTs\|dTs\|5mCs\|dTs\|oGs\|L5mCs\|oAs\|oGs\|oGs\|oA] |
| 4779 | [oTs\|LTs\|oGs\|oTs\|o5mCs\|oGs\|5mCs\|dTs\|dTs\|5mCs\|dTs\|dTs\|5mCs\|dTs\|dGs\|5mCs\|oAs\|oGs\|oG] |
| 4780 | [oTs\|oTs\|LGs\|oTs\|o5mCs\|oGs\|5mCs\|dTs\|dTs\|5mCs\|dTs\|dTs\|5mCs\|dTs\|dGs\|5mCs\|oAs\|oGs\|oG] |
| 4781 | [oTs\|oTs\|oGs\|LTs\|o5mCs\|oGs\|5mCs\|dTs\|dTs\|5mCs\|dTs\|dTs\|5mCs\|dTs\|dGs\|5mCs\|oAs\|oGs\|oG] |
| 4782 | [oTs\|oTs\|oGs\|oTs\|L5mCs\|oGs\|5mCs\|dTs\|dTs\|5mCs\|dTs\|dTs\|5mCs\|dTs\|dGs\|5mCs\|oAs\|oGs\|oG] |
| 4783 | [oTs\|oTs\|oGs\|dTs\|5mCs\|dGs\|5mCs\|dTs\|dTs\|5mCs\|dTs\|dTs\|5mCs\|dTs\|oGs\|o5mCs\|oAs\|oGs\|LGs\|oA] |
| 4784 | [oTs\|oTs\|oGs\|dTs\|5mCs\|dGs\|5mCs\|dTs\|dTs\|5mCs\|dTs\|dTs\|5mCs\|dTs\|oGs\|o5mCs\|oAs\|LGs\|oGs\|oA] |
| 4785 | [oTs\|oTs\|oGs\|dTs\|5mCs\|dGs\|5mCs\|dTs\|dTs\|5mCs\|dTs\|dTs\|5mCs\|dTs\|oGs\|o5mCs\|LAs\|oGs\|oGs\|oA] |
| 4786 | [oTs\|LTs\|oGs\|oTs\|o5mCs\|oGs\|5mCs\|dTs\|dTs\|5mCs\|dTs\|dTs\|5mCs\|dTs\|dGs\|5mCs\|oAs\|oG] |
| 4787 | [oTs\|oTs\|LGs\|oTs\|o5mCs\|oGs\|5mCs\|dTs\|dTs\|5mCs\|dTs\|dTs\|5mCs\|dTs\|dGs\|5mCs\|oAs\|oG] |
| 4788 | [oTs\|oTs\|oGs\|LTs\|o5mCs\|oGs\|5mCs\|dTs\|dTs\|5mCs\|dTs\|dTs\|5mCs\|dTs\|dGs\|5mCs\|oAs\|oG] |
| 4789 | [oTs\|oTs\|oGs\|oTs\|L5mCs\|oGs\|5mCs\|dTs\|dTs\|5mCs\|dTs\|dTs\|5mCs\|dTs\|dGs\|5mCs\|oAs\|oG] |
| 4790 | [oGs\|oTs\|5mCs\|dGs\|5mCs\|dTs\|dTs\|5mCs\|dTs\|dTs\|5mCs\|dTs\|oGs\|o5mCs\|oAs\|oGs\|LGs\|oA] |
| 4791 | [oGs\|oTs\|5mCs\|dGs\|5mCs\|dTs\|dTs\|5mCs\|dTs\|dTs\|5mCs\|dTs\|oGs\|o5mCs\|oAs\|LGs\|oGs\|oA] |
| 4792 | [oGs\|oTs\|5mCs\|dGs\|5mCs\|dTs\|dTs\|5mCs\|dTs\|dTs\|5mCs\|dTs\|oGs\|o5mCs\|LAs\|oGs\|oGs\|oA] |
| 4793 | [oGs\|oTs\|5mCs\|dGs\|5mCs\|dTs\|dTs\|5mCs\|dTs\|dTs\|5mCs\|dTs\|oGs\|L5mCs\|oAs\|oGs\|oGs\|oA] |
| 4794 | [oTs\|LTs\|oGs\|oTs\|o5mCs\|dGs\|5mCs\|dTs\|dTs\|5mCs\|dTs\|dTs\|5mCs\|dTs\|dGs\|o5mCs\|oAs\|oGs\|oGs\|oA] |
| 4795 | [oTs\|oTs\|LGs\|oTs\|o5mCs\|dGs\|5mCs\|dTs\|dTs\|5mCs\|dTs\|dTs\|5mCs\|dTs\|dGs\|o5mCs\|oAs\|oGs\|oGs\|oA] |
| 4796 | [oTs\|oTs\|oGs\|LTs\|o5mCs\|dGs\|5mCs\|dTs\|dTs\|5mCs\|dTs\|dTs\|5mCs\|dTs\|dGs\|o5mCs\|oAs\|oGs\|oGs\|oA] |
| 4797 | [oTs\|oTs\|oGs\|oTs\|o5mCs\|dGs\|5mCs\|dTs\|dTs\|5mCs\|dTs\|dTs\|5mCs\|dTs\|dGs\|o5mCs\|oAs\|oGs\|LGs\|oA] |
| 4798 | [oTs\|oTs\|oGs\|oTs\|o5mCs\|dGs\|5mCs\|dTs\|dTs\|5mCs\|dTs\|dTs\|5mCs\|dTs\|dGs\|o5mCs\|oAs\|LGs\|oGs\|oA] |
| 4799 | [oTs\|oTs\|oGs\|oTs\|o5mCs\|dGs\|5mCs\|dTs\|dTs\|5mCs\|dTs\|dTs\|5mCs\|dTs\|dGs\|o5mCs\|LAs\|oGs\|oGs\|oA] |
| 4800 | [oTs\|LTs\|oGs\|oTs\|o5mCs\|dGs\|5mCs\|dTs\|dTs\|5mCs\|dTs\|dTs\|5mCs\|dTs\|dGs\|o5mCs\|oAs\|oGs\|oG] |
| 4801 | [oTs\|oTs\|LGs\|oTs\|o5mCs\|dGs\|5mCs\|dTs\|dTs\|5mCs\|dTs\|dTs\|5mCs\|dTs\|dGs\|o5mCs\|oAs\|oGs\|oG] |
| 4802 | [oTs\|oTs\|oGs\|LTs\|o5mCs\|dGs\|5mCs\|dTs\|dTs\|5mCs\|dTs\|dTs\|5mCs\|dTs\|dGs\|o5mCs\|oAs\|oGs\|oG] |
| 4803 | [oTs\|oGs\|oTs\|o5mCs\|dGs\|5mCs\|dTs\|dTs\|5mCs\|dTs\|dTs\|5mCs\|dTs\|dGs\|o5mCs\|oAs\|oGs\|LGs\|oA] |
| 4804 | [oTs\|oGs\|oTs\|o5mCs\|dGs\|5mCs\|dTs\|dTs\|5mCs\|dTs\|dTs\|5mCs\|dTs\|dGs\|o5mCs\|oAs\|LGs\|oGs\|oA] |
| 4805 | [oTs\|oGs\|oTs\|o5mCs\|dGs\|5mCs\|dTs\|dTs\|5mCs\|dTs\|dTs\|5mCs\|dTs\|dGs\|o5mCs\|LAs\|oGs\|oGs\|oA] |
| 4806 | [oTs\|LTs\|oGs\|oTs\|o5mCs\|dGs\|5mCs\|dTs\|dTs\|5mCs\|dTs\|dTs\|5mCs\|dTs\|dGs\|o5mCs\|oAs\|oG] |
| 4807 | [oTs\|oTs\|LGs\|oTs\|o5mCs\|dGs\|5mCs\|dTs\|dTs\|5mCs\|dTs\|dTs\|5mCs\|dTs\|dGs\|o5mCs\|oAs\|oG] |
| 4808 | [oTs\|oTs\|oGs\|LTs\|o5mCs\|dGs\|5mCs\|dTs\|dTs\|5mCs\|dTs\|dTs\|5mCs\|dTs\|dGs\|o5mCs\|oAs\|oG] |
| 4809 | [oGs\|oTs\|o5mCs\|dGs\|5mCs\|dTs\|dTs\|5mCs\|dTs\|dTs\|5mCs\|dTs\|dGs\|o5mCs\|oAs\|oGs\|LGs\|oA] |
| 4810 | [oGs\|oTs\|o5mCs\|dGs\|5mCs\|dTs\|dTs\|5mCs\|dTs\|dTs\|5mCs\|dTs\|dGs\|o5mCs\|oAs\|LGs\|oGs\|oA] |
| 4811 | [oGs\|oTs\|o5mCs\|dGs\|5mCs\|dTs\|dTs\|5mCs\|dTs\|dTs\|5mCs\|dTs\|dGs\|o5mCs\|LAs\|oGs\|oGs\|oA] |
| 4812 | [oTs\|LTs\|oGs\|oTs\|o5mCs\|dGs\|5mCs\|dTs\|dTs\|5mCs\|dTs\|dTs\|5mCs\|dTs\|dGs\|o5mCs\|oA] |
| 4813 | [oTs\|oTs\|LGs\|oTs\|o5mCs\|dGs\|5mCs\|dTs\|dTs\|5mCs\|dTs\|dTs\|5mCs\|dTs\|dGs\|o5mCs\|oA] |
| 4814 | [oTs\|oTs\|oGs\|LTs\|o5mCs\|dGs\|5mCs\|dTs\|dTs\|5mCs\|dTs\|dTs\|5mCs\|dTs\|dGs\|o5mCs\|oA] |
| 4815 | [oTs\|o5mCs\|dGs\|5mCs\|dTs\|dTs\|5mCs\|dTs\|dTs\|5mCs\|dTs\|dGs\|o5mCs\|oAs\|oGs\|LGs\|oA] |
| 4816 | [oTs\|o5mCs\|dGs\|5mCs\|dTs\|dTs\|5mCs\|dTs\|dTs\|5mCs\|dTs\|dGs\|o5mCs\|oAs\|LGs\|oGs\|oA] |
| 4817 | [oTs\|o5mCs\|dGs\|5mCs\|dTs\|dTs\|5mCs\|dTs\|dTs\|5mCs\|dTs\|dGs\|o5mCs\|LAs\|oGs\|oGs\|oA] |
| 4818 | [oTs\|LGs\|oTs\|o5mCs\|dGs\|5mCs\|dTs\|dTs\|5mCs\|dTs\|dTs\|5mCs\|dTs\|dGs\|o5mCs\|oAs\|oGs\|oGs\|oA] |
| 4819 | [oTs\|oGs\|LTs\|o5mCs\|dGs\|5mCs\|dTs\|dTs\|5mCs\|dTs\|dTs\|5mCs\|dTs\|dGs\|o5mCs\|oAs\|oGs\|oGs\|oA] |
| 4820 | [oTs\|oTs\|oGs\|oTs\|o5mCs\|dGs\|5mCs\|dTs\|dTs\|5mCs\|dTs\|dTs\|5mCs\|dTs\|dGs\|o5mCs\|oAs\|LGs\|oG] |
| 4821 | [oTs\|oTs\|oGs\|oTs\|o5mCs\|dGs\|5mCs\|dTs\|dTs\|5mCs\|dTs\|dTs\|5mCs\|dTs\|dGs\|o5mCs\|LAs\|oGs\|oG] |
| 4822 | [oTs\|LGs\|oTs\|o5mCs\|dGs\|5mCs\|dTs\|dTs\|5mCs\|dTs\|dTs\|5mCs\|dTs\|dGs\|o5mCs\|oAs\|oGs\|oG] |
| 4823 | [oTs\|oGs\|LTs\|o5mCs\|dGs\|5mCs\|dTs\|dTs\|5mCs\|dTs\|dTs\|5mCs\|dTs\|dGs\|o5mCs\|oAs\|oGs\|oG] |
| 4824 | [oTs\|oGs\|oTs\|o5mCs\|dGs\|5mCs\|dTs\|dTs\|5mCs\|dTs\|dTs\|5mCs\|dTs\|dGs\|o5mCs\|oAs\|LGs\|oG] |
| 4825 | [oTs\|oGs\|oTs\|o5mCs\|dGs\|5mCs\|dTs\|dTs\|5mCs\|dTs\|dTs\|5mCs\|dTs\|dGs\|o5mCs\|LAs\|oGs\|oG] |
| 4826 | [oTs\|LGs\|oTs\|o5mCs\|dGs\|5mCs\|dTs\|dTs\|5mCs\|dTs\|dTs\|5mCs\|dTs\|dGs\|o5mCs\|oAs\|oG] |
| 4827 | [oTs\|oGs\|LTs\|o5mCs\|dGs\|5mCs\|dTs\|dTs\|5mCs\|dTs\|dTs\|5mCs\|dTs\|dGs\|o5mCs\|oAs\|oG] |
| 4828 | [oTs\|oGs\|oTs\|o5mCs\|dGs\|5mCs\|dTs\|dTs\|5mCs\|dTs\|dTs\|5mCs\|dTs\|dGs\|o5mCs\|LAs\|oG] |
| 4829 | [oTs\|oTs\|oGs\|oTs\|o5mCs\|oGs\|o5mCs\|oTs\|dTs\|5mCs\|dTs\|dTs\|5mCs\|dTs\|dGs\|5mCs\|dAs\|dGs\|oGs\|oA] |
| 4830 | [oTs\|oTs\|dGs\|dTs\|5mCs\|dGs\|5mCs\|dTs\|dTs\|5mCs\|dTs\|dTs\|o5mCs\|oTs\|oGs\|o5mCs\|oAs\|oGs\|oGs\|oA] |
| 4831 | [oTs\|oTs\|oGs\|oTs\|o5mCs\|oGs\|o5mCs\|dTs\|dTs\|5mCs\|dTs\|dTs\|5mCs\|dTs\|dGs\|5mCs\|dAs\|oGs\|oGs\|oA] |
| 4832 | [oTs\|oTs\|oGs\|dTs\|5mCs\|dGs\|5mCs\|dTs\|dTs\|5mCs\|dTs\|dTs\|5mCs\|oTs\|oGs\|o5mCs\|oAs\|oGs\|oGs\|oA] |
| 4833 | [oTs\|oTs\|oGs\|oTs\|o5mCs\|oGs\|o5mCs\|dTs\|dTs\|5mCs\|dTs\|dTs\|5mCs\|dTs\|dGs\|5mCs\|dAs\|oGs\|oG] |
| 4834 | [oTs\|oGs\|dTs\|5mCs\|dGs\|5mCs\|dTs\|dTs\|5mCs\|dTs\|dTs\|5mCs\|oTs\|oGs\|o5mCs\|oAs\|oGs\|oGs\|oA] |
| 4835 | [oTs\|oTs\|oGs\|oTs\|o5mCs\|oGs\|5mCs\|dTs\|dTs\|5mCs\|dTs\|dTs\|5mCs\|dTs\|dGs\|5mCs\|oAs\|oGs\|oGs\|oA] |
| 4836 | [oTs\|oTs\|oGs\|oTs\|5mCs\|dGs\|5mCs\|dTs\|dTs\|5mCs\|dTs\|dTs\|5mCs\|dTs\|oGs\|o5mCs\|oAs\|oGs\|oGs\|oA] |
| 4837 | [oTs\|oTs\|oGs\|oTs\|o5mCs\|oGs\|5mCs\|dTs\|dTs\|5mCs\|dTs\|dTs\|5mCs\|dTs\|dGs\|5mCs\|oAs\|oGs\|oG] |
| 4838 | [oTs\|oTs\|oGs\|dTs\|5mCs\|dGs\|5mCs\|dTs\|dTs\|5mCs\|dTs\|dTs\|5mCs\|dTs\|oGs\|o5mCs\|oAs\|oGs\|oGs\|oA] |
| 4839 | [oTs\|oTs\|oGs\|oTs\|o5mCs\|oGs\|5mCs\|dTs\|dTs\|5mCs\|dTs\|dTs\|5mCs\|dTs\|dGs\|5mCs\|oAs\|oG] |
| 4840 | [oGs\|oTs\|5mCs\|dGs\|5mCs\|dTs\|dTs\|5mCs\|dTs\|dTs\|5mCs\|dTs\|oGs\|o5mCs\|oAs\|oGs\|oGs\|oA] |
| 4841 | [oTs\|oTs\|oGs\|oTs\|o5mCs\|dGs\|5mCs\|dTs\|dTs\|5mCs\|dTs\|dTs\|5mCs\|dTs\|dGs\|o5mCs\|oAs\|oGs\|oGs\|oA] |
| 4842 | [oTs\|oTs\|oGs\|oTs\|o5mCs\|dGs\|5mCs\|dTs\|dTs\|5mCs\|dTs\|dTs\|5mCs\|dTs\|dGs\|o5mCs\|oAs\|oGs\|oG] |
| 4843 | [oTs\|oTs\|oGs\|oTs\|o5mCs\|dGs\|5mCs\|dTs\|dTs\|5mCs\|dTs\|dTs\|5mCs\|dTs\|dGs\|o5mCs\|oAs\|oG] |
| 4844 | [oGs\|oTs\|o5mCs\|dGs\|5mCs\|dTs\|dTs\|5mCs\|dTs\|dTs\|5mCs\|dTs\|dGs\|o5mCs\|oAs\|oGs\|oGs\|oA] |
| 4845 | [oTs\|oTs\|oGs\|oTs\|o5mCs\|dGs\|5mCs\|dTs\|dTs\|5mCs\|dTs\|dTs\|5mCs\|dTs\|dGs\|o5mCs\|oA] |
| 4846 | [oTs\|o5mCs\|dGs\|5mCs\|dTs\|dTs\|5mCs\|dTs\|dTs\|5mCs\|dTs\|dGs\|o5mCs\|oAs\|oGs\|oGs\|oA] |
| 4847 | [oTs\|oGs\|oTs\|o5mCs\|dGs\|5mCs\|dTs\|dTs\|5mCs\|dTs\|dTs\|5mCs\|dTs\|dGs\|o5mCs\|oAs\|oGs\|oGs\|oA] |
| 4848 | [oTs\|oGs\|oTs\|o5mCs\|dGs\|5mCs\|dTs\|dTs\|5mCs\|dTs\|dTs\|5mCs\|dTs\|dGs\|o5mCs\|oAs\|oGs\|oG] |
| 4849 | [oTs\|oGs\|oTs\|o5mCs\|dGs\|5mCs\|dTs\|dTs\|5mCs\|dTs\|dTs\|5mCs\|dTs\|dGs\|o5mCs\|oAs\|oG] |
| 4850 | [oTs\|oTs\|oGp\|oTs\|o5mCs\|dGs\|5mCs\|dTs\|dTs\|5mCs\|dTs\|dTs\|5mCs\|dTs\|dGs\|o5mCs\|oAs\|oGs\|oGs\|oA] |
| 4851 | [oTs\|oTs\|oGs\|oTp\|o5mCs\|dGs\|5mCs\|dTs\|dTs\|5mCs\|dTs\|dTs\|5mCs\|dTs\|dGs\|o5mCs\|oAs\|oGs\|oGs\|oA] |
| 4852 | [oTs\|oTs\|oGp\|oTp\|o5mCs\|dGs\|5mCs\|dTs\|dTs\|5mCs\|dTs\|dTs\|5mCs\|dTs\|dGs\|o5mCs\|oAs\|oGs\|oGs\|oA] |
| 4853 | [oTs\|oTs\|oGs\|oTs\|o5mCs\|dGs\|5mCs\|dTs\|dTs\|5mCs\|dTs\|dTs\|5mCs\|dTs\|dGs\|o5mCs\|oAp\|oGs\|oGs\|oA] |
| 4854 | [oTs\|oTs\|oGs\|oTs\|o5mCs\|dGs\|5mCs\|dTs\|dTs\|5mCs\|dTs\|dTs\|5mCs\|dTs\|dGs\|o5mCp\|oAs\|oGs\|oGs\|oA] |
| 4855 | [oTs\|oTs\|oGs\|oTs\|o5mCs\|dGs\|5mCs\|dTs\|dTs\|5mCs\|dTs\|dTs\|5mCs\|dTs\|dGs\|o5mCp\|oAp\|oGs\|oGs\|oA] |
| 4856 | [oTs\|oTs\|oGp\|oTs\|o5mCs\|dGs\|5mCs\|dTs\|dTs\|5mCs\|dTs\|dTs\|5mCs\|dTs\|dGs\|o5mCs\|oAp\|oGs\|oGs\|oA] |
| 4857 | [oTs\|oTs\|oGp\|oTs\|o5mCs\|dGs\|5mCs\|dTs\|dTs\|5mCs\|dTs\|dTs\|5mCs\|dTs\|dGs\|o5mCp\|oAs\|oGs\|oGs\|oA] |
| 4858 | [oTs\|oTs\|oGs\|oTp\|o5mCs\|dGs\|5mCs\|dTs\|dTs\|5mCs\|dTs\|dTs\|5mCs\|dTs\|dGs\|o5mCs\|oAp\|oGs\|oGs\|oA] |
| 4859 | [oTs\|oTs\|oGs\|oTp\|o5mCs\|dGs\|5mCs\|dTs\|dTs\|5mCs\|dTs\|dTs\|5mCs\|dTs\|dGs\|o5mCp\|oAs\|oGs\|oGs\|oA] |
| 4860 | [oTs\|oTs\|oGp\|oTs\|o5mCs\|dGs\|5mCs\|dTs\|dTs\|5mCs\|dTs\|dTs\|5mCs\|dTs\|dGs\|o5mCp\|oAp\|oGs\|oGs\|oA] |
| 4861 | [oTs\|oTs\|oGs\|oTp\|o5mCs\|dGs\|5mCs\|dTs\|dTs\|5mCs\|dTs\|dTs\|5mCs\|dTs\|dGs\|o5mCp\|oAp\|oGs\|oGs\|oA] |
| 4862 | [oTs\|oTs\|oGp\|oTp\|o5mCs\|dGs\|5mCs\|dTs\|dTs\|5mCs\|dTs\|dTs\|5mCs\|dTs\|dGs\|o5mCs\|oAp\|oGs\|oGs\|oA] |
| 4863 | [oTs\|oTs\|oGp\|oTp\|o5mCs\|dGs\|5mCs\|dTs\|dTs\|5mCs\|dTs\|dTs\|5mCs\|dTs\|dGs\|o5mCp\|oAs\|oGs\|oGs\|oA] |
| 4864 | [oTs\|oTs\|oGp\|oTp\|o5mCs\|dGs\|5mCs\|dTs\|dTs\|5mCs\|dTs\|dTs\|5mCs\|dTs\|dGs\|o5mCp\|oAp\|oGs\|oGs\|oA] |
| 4865 | [oTs\|oTs\|oGs\|oTs\|o5mCs\|dGs\|5mCs\|dTs\|dTs\|5mCs\|dTs\|dTs\|5mCs\|dTs\|dGs\|o5mCs\|oAs\|oGs\|oGs\|oAs\|oA] |
| 4866 | [oTs\|oTs\|oGp\|oTs\|o5mCs\|dGs\|5mCs\|dTs\|dTs\|5mCs\|dTs\|dTs\|5mCs\|dTs\|dGs\|o5mCs\|oAs\|oGs\|oGs\|oAs\|oA] |
| 4867 | [oTs\|oTs\|oGs\|oTp\|o5mCs\|dGs\|5mCs\|dTs\|dTs\|5mCs\|dTs\|dTs\|5mCs\|dTs\|dGs\|o5mCs\|oAs\|oGs\|oGs\|oAs\|oA] |
| 4868 | [oTs\|oTs\|oGp\|oTp\|o5mCs\|dGs\|5mCs\|dTs\|dTs\|5mCs\|dTs\|dTs\|5mCs\|dTs\|dGs\|o5mCs\|oAs\|oGs\|oGs\|oAs\|oA] |
| 4869 | [oTs\|oTs\|oGs\|oTs\|o5mCs\|dGs\|5mCs\|dTs\|dTs\|5mCs\|dTs\|dTs\|5mCs\|dTs\|dGs\|o5mCs\|oAp\|oGs\|oGs\|oAs\|oA] |
| 4870 | [oTs\|oTs\|oGs\|oTs\|o5mCs\|dGs\|5mCs\|dTs\|dTs\|5mCs\|dTs\|dTs\|5mCs\|dTs\|dGs\|o5mCp\|oAs\|oGs\|oGs\|oAs\|oA] |
| 4871 | [oTs\|oTs\|oGs\|oTs\|o5mCs\|dGs\|5mCs\|dTs\|dTs\|5mCs\|dTs\|dTs\|5mCs\|dTs\|dGs\|o5mCp\|oAp\|oGs\|oGs\|oAs\|oA] |
| 4872 | [oTs\|oTs\|oGp\|oTs\|o5mCs\|dGs\|5mCs\|dTs\|dTs\|5mCs\|dTs\|dTs\|5mCs\|dTs\|dGs\|o5mCs\|oAp\|oGs\|oGs\|oAs\|oA] |
| 4873 | [oTs\|oTs\|oGp\|oTs\|o5mCs\|dGs\|5mCs\|dTs\|dTs\|5mCs\|dTs\|dTs\|5mCs\|dTs\|dGs\|o5mCp\|oAs\|oGs\|oGs\|oAs\|oA] |
| 4874 | [oTs\|oTs\|oGs\|oTp\|o5mCs\|dGs\|5mCs\|dTs\|dTs\|5mCs\|dTs\|dTs\|5mCs\|dTs\|dGs\|o5mCs\|oAp\|oGs\|oGs\|oAs\|oA] |
| 4875 | [oTs\|oTs\|oGs\|oTp\|o5mCs\|dGs\|5mCs\|dTs\|dTs\|5mCs\|dTs\|dTs\|5mCs\|dTs\|dGs\|o5mCp\|oAs\|oGs\|oGs\|oAs\|oA] |
| 4876 | [oTs\|oTs\|oGp\|oTs\|o5mCs\|dGs\|5mCs\|dTs\|dTs\|5mCs\|dTs\|dTs\|5mCs\|dTs\|dGs\|o5mCp\|oAp\|oGs\|oGs\|oAs\|oA] |
| 4877 | [oTs\|oTs\|oGs\|oTp\|o5mCs\|dGs\|5mCs\|dTs\|dTs\|5mCs\|dTs\|dTs\|5mCs\|dTs\|dGs\|o5mCp\|oAp\|oGs\|oGs\|oAs\|oA] |
| 4878 | [oTs\|oTs\|oGp\|oTp\|o5mCs\|dGs\|5mCs\|dTs\|dTs\|5mCs\|dTs\|dTs\|5mCs\|dTs\|dGs\|o5mCs\|oAp\|oGs\|oGs\|oAs\|oA] |
| 4879 | [oTs\|oTs\|oGp\|oTp\|o5mCs\|dGs\|5mCs\|dTs\|dTs\|5mCs\|dTs\|dTs\|5mCs\|dTs\|dGs\|o5mCp\|oAs\|oGs\|oGs\|oAs\|oA] |
| 4880 | [oTs\|oTs\|oGp\|oTp\|o5mCs\|dGs\|5mCs\|dTs\|dTs\|5mCs\|dTs\|dTs\|5mCs\|dTs\|dGs\|o5mCp\|oAp\|oGs\|oGs\|oAs\|oA] |
| 4881 | [oTs\|oTs\|oGs\|oTs\|o5mCs\|dGs\|5mCs\|dTs\|dTs\|5mCs\|dTs\|dTs\|5mCs\|dTs\|dGs\|o5mCs\|oAs\|oGs\|oGs\|oAs\|oAs\|o5mC] |
| 4882 | [oTs\|oTs\|oGp\|oTs\|o5mCs\|dGs\|5mCs\|dTs\|dTs\|5mCs\|dTs\|dTs\|5mCs\|dTs\|dGs\|o5mCs\|oAs\|oGs\|oGs\|oAs\|oAs\|o5mC] |
| 4883 | [oTs\|oTs\|oGs\|oTp\|o5mCs\|dGs\|5mCs\|dTs\|dTs\|5mCs\|dTs\|dTs\|5mCs\|dTs\|dGs\|o5mCs\|oAs\|oGs\|oGs\|oAs\|oAs\|o5mC] |
| 4884 | [oTs\|oTs\|oGp\|oTp\|o5mCs\|dGs\|5mCs\|dTs\|dTs\|5mCs\|dTs\|dTs\|5mCs\|dTs\|dGs\|o5mCs\|oAs\|oGs\|oGs\|oAs\|oAs\|o5mC] |
| 4885 | [oTs\|oTs\|oGs\|oTs\|o5mCs\|dGs\|5mCs\|dTs\|dTs\|5mCs\|dTs\|dTs\|5mCs\|dTs\|dGs\|o5mCs\|oAp\|oGs\|oGs\|oAs\|oAs\|o5mC] |
| 4886 | [oTs\|oTs\|oGs\|oTs\|o5mCs\|dGs\|5mCs\|dTs\|dTs\|5mCs\|dTs\|dTs\|5mCs\|dTs\|dGs\|o5mCp\|oAs\|oGs\|oGs\|oAs\|oAs\|o5mC] |
| 4887 | [oTs\|oTs\|oGs\|oTs\|o5mCs\|dGs\|5mCs\|dTs\|dTs\|5mCs\|dTs\|dTs\|5mCs\|dTs\|dGs\|o5mCp\|oAp\|oGs\|oGs\|oAs\|oAs\|o5mC] |
| 4888 | [oTs\|oTs\|oGp\|oTs\|o5mCs\|dGs\|5mCs\|dTs\|dTs\|5mCs\|dTs\|dTs\|5mCs\|dTs\|dGs\|o5mCs\|oAp\|oGs\|oGs\|oAs\|oAs\|o5mC] |
| 4889 | [oTs\|oTs\|oGp\|oTs\|o5mCs\|dGs\|5mCs\|dTs\|dTs\|5mCs\|dTs\|dTs\|5mCs\|dTs\|dGs\|o5mCp\|oAs\|oGs\|oGs\|oAs\|oAs\|o5mC] |
| 4890 | [oTs\|oTs\|oGs\|oTp\|o5mCs\|dGs\|5mCs\|dTs\|dTs\|5mCs\|dTs\|dTs\|5mCs\|dTs\|dGs\|o5mCs\|oAp\|oGs\|oGs\|oAs\|oAs\|o5mC] |
| 4891 | [oTs\|oTs\|oGs\|oTp\|o5mCs\|dGs\|5mCs\|dTs\|dTs\|5mCs\|dTs\|dTs\|5mCs\|dTs\|dGs\|o5mCp\|oAs\|oGs\|oGs\|oAs\|oAs\|o5mC] |
| 4892 | [oTs\|oTs\|oGp\|oTs\|o5mCs\|dGs\|5mCs\|dTs\|dTs\|5mCs\|dTs\|dTs\|5mCs\|dTs\|dGs\|o5mCp\|oAp\|oGs\|oGs\|oAs\|oAs\|o5mC] |
| 4893 | [oTs\|oTs\|oGs\|oTp\|o5mCs\|dGs\|5mCs\|dTs\|dTs\|5mCs\|dTs\|dTs\|5mCs\|dTs\|dGs\|o5mCp\|oAp\|oGs\|oGs\|oAs\|oAs\|o5mC] |
| 4894 | [oTs\|oTs\|oGp\|oTp\|o5mCs\|dGs\|5mCs\|dTs\|dTs\|5mCs\|dTs\|dTs\|5mCs\|dTs\|dGs\|o5mCs\|oAp\|oGs\|oGs\|oAs\|oAs\|o5mC] |
| 4895 | [oTs\|oTs\|oGp\|oTp\|o5mCs\|dGs\|5mCs\|dTs\|dTs\|5mCs\|dTs\|dTs\|5mCs\|dTs\|dGs\|o5mCp\|oAs\|oGs\|oGs\|oAs\|oAs\|o5mC] |
| 4896 | [oTs\|oTs\|oGp\|oTp\|o5mCs\|dGs\|5mCs\|dTs\|dTs\|5mCs\|dTs\|dTs\|5mCs\|dTs\|dGs\|o5mCp\|oAp\|oGs\|oGs\|oAs\|oAs\|o5mC] |
| 4897 | [oTs\|oTs\|oGs\|oTs\|o5mCs\|dGs\|5mCs\|dTs\|dTs\|5mCs\|dTs\|dTs\|5mCs\|dTs\|dGs\|o5mCs\|oAs\|oGs\|oGs\|oAs\|oAs\|o5mCs\|oA] |
| 4898 | [oTs\|oTs\|oGp\|oTs\|o5mCs\|dGs\|5mCs\|dTs\|dTs\|5mCs\|dTs\|dTs\|5mCs\|dTs\|dGs\|o5mCs\|oAs\|oGs\|oGs\|oAs\|oAs\|o5mCs\|oA] |
| 4899 | [oTs\|oTs\|oGs\|oTp\|o5mCs\|dGs\|5mCs\|dTs\|dTs\|5mCs\|dTs\|dTs\|5mCs\|dTs\|dGs\|o5mCs\|oAs\|oGs\|oGs\|oAs\|oAs\|o5mCs\|oA] |
| 4900 | [oTs\|oTs\|oGp\|oTp\|o5mCs\|dGs\|5mCs\|dTs\|dTs\|5mCs\|dTs\|dTs\|5mCs\|dTs\|dGs\|o5mCs\|oAs\|oGs\|oGs\|oAs\|oAs\|o5mCs\|oA] |
| 4901 | [oTs\|oTs\|oGs\|oTs\|o5mCs\|dGs\|5mCs\|dTs\|dTs\|5mCs\|dTs\|dTs\|5mCs\|dTs\|dGs\|o5mCs\|oAp\|oGs\|oGs\|oAs\|oAs\|o5mCs\|oA] |
| 4902 | [oTs\|oTs\|oGs\|oTs\|o5mCs\|dGs\|5mCs\|dTs\|dTs\|5mCs\|dTs\|dTs\|5mCs\|dTs\|dGs\|o5mCp\|oAs\|oGs\|oGs\|oAs\|oAs\|o5mCs\|oA] |
| 4903 | [oTs\|oTs\|oGs\|oTs\|o5mCs\|dGs\|5mCs\|dTs\|dTs\|5mCs\|dTs\|dTs\|5mCs\|dTs\|dGs\|o5mCp\|oAp\|oGs\|oGs\|oAs\|oAs\|o5mCs\|oA] |
| 4904 | [oTs\|oTs\|oGp\|oTs\|o5mCs\|dGs\|5mCs\|dTs\|dTs\|5mCs\|dTs\|dTs\|5mCs\|dTs\|dGs\|o5mCs\|oAp\|oGs\|oGs\|oAs\|oAs\|o5mCs\|oA] |
| 4905 | [oTs\|oTs\|oGp\|oTs\|o5mCs\|dGs\|5mCs\|dTs\|dTs\|5mCs\|dTs\|dTs\|5mCs\|dTs\|dGs\|o5mCp\|oAs\|oGs\|oGs\|oAs\|oAs\|o5mCs\|oA] |
| 4906 | [oTs\|oTs\|oGs\|oTp\|o5mCs\|dGs\|5mCs\|dTs\|dTs\|5mCs\|dTs\|dTs\|5mCs\|dTs\|dGs\|o5mCs\|oAp\|oGs\|oGs\|oAs\|oAs\|o5mCs\|oA] |
| 4907 | [oTs\|oTs\|oGs\|oTp\|o5mCs\|dGs\|5mCs\|dTs\|dTs\|5mCs\|dTs\|dTs\|5mCs\|dTs\|dGs\|o5mCp\|oAs\|oGs\|oGs\|oAs\|oAs\|o5mCs\|oA] |
| 4908 | [oTs\|oTs\|oGp\|oTs\|o5mCs\|dGs\|5mCs\|dTs\|dTs\|5mCs\|dTs\|dTs\|5mCs\|dTs\|dGs\|o5mCp\|oAp\|oGs\|oGs\|oAs\|oAs\|o5mCs\|oA] |
| 4909 | [oTs\|oTs\|oGs\|oTp\|o5mCs\|dGs\|5mCs\|dTs\|dTs\|5mCs\|dTs\|dTs\|5mCs\|dTs\|dGs\|o5mCp\|oAp\|oGs\|oGs\|oAs\|oAs\|o5mCs\|oA] |
| 4910 | [oTs\|oTs\|oGp\|oTp\|o5mCs\|dGs\|5mCs\|dTs\|dTs\|5mCs\|dTs\|dTs\|5mCs\|dTs\|dGs\|o5mCs\|oAp\|oGs\|oGs\|oAs\|oAs\|o5mCs\|oA] |
| 4911 | [oTs\|oTs\|oGp\|oTp\|o5mCs\|dGs\|5mCs\|dTs\|dTs\|5mCs\|dTs\|dTs\|5mCs\|dTs\|dGs\|o5mCp\|oAs\|oGs\|oGs\|oAs\|oAs\|o5mCs\|oA] |
| 4912 | [oTs\|oTs\|oGp\|oTp\|o5mCs\|dGs\|5mCs\|dTs\|dTs\|5mCs\|dTs\|dTs\|5mCs\|dTs\|dGs\|o5mCp\|oAp\|oGs\|oGs\|oAs\|oAs\|o5mCs\|oA] |
| 4913 | [oTs\|oTs\|oGs\|oTs\|o5mCs\|dGs\|5mCs\|dTs\|dTs\|5mCs\|dTs\|dTs\|5mCs\|dTs\|dGs\|5mCs\|oAs\|oGs\|oGs\|oAs\|oA] |
| 4914 | [oTs\|oTs\|oGp\|oTs\|o5mCs\|dGs\|5mCs\|dTs\|dTs\|5mCs\|dTs\|dTs\|5mCs\|dTs\|dGs\|5mCs\|oAs\|oGs\|oGs\|oAs\|oA] |
| 4915 | [oTs\|oTs\|oGs\|oTp\|o5mCs\|dGs\|5mCs\|dTs\|dTs\|5mCs\|dTs\|dTs\|5mCs\|dTs\|dGs\|5mCs\|oAs\|oGs\|oGs\|oAs\|oA] |
| 4916 | [oTs\|oTs\|oGp\|oTp\|o5mCs\|dGs\|5mCs\|dTs\|dTs\|5mCs\|dTs\|dTs\|5mCs\|dTs\|dGs\|5mCs\|oAs\|oGs\|oGs\|oAs\|oA] |
| 4917 | [oTs\|oTs\|oGs\|oTs\|o5mCs\|dGs\|5mCs\|dTs\|dTs\|5mCs\|dTs\|dTs\|5mCs\|dTs\|dGs\|5mCs\|oAp\|oGs\|oGs\|oAs\|oA] |
| 4918 | [oTs\|oTs\|oGs\|oTs\|o5mCs\|dGs\|5mCs\|dTs\|dTs\|5mCs\|dTs\|dTs\|5mCs\|dTs\|dGs\|5mCp\|oAs\|oGs\|oGs\|oAs\|oA] |
| 4919 | [oTs\|oTs\|oGs\|oTs\|o5mCs\|dGs\|5mCs\|dTs\|dTs\|5mCs\|dTs\|dTs\|5mCs\|dTs\|dGs\|5mCp\|oAp\|oGs\|oGs\|oAs\|oA] |
| 4920 | [oTs\|oTs\|oGp\|oTs\|o5mCs\|dGs\|5mCs\|dTs\|dTs\|5mCs\|dTs\|dTs\|5mCs\|dTs\|dGs\|5mCs\|oAp\|oGs\|oGs\|oAs\|oA] |
| 4921 | [oTs\|oTs\|oGp\|oTs\|o5mCs\|dGs\|5mCs\|dTs\|dTs\|5mCs\|dTs\|dTs\|5mCs\|dTs\|dGs\|5mCp\|oAs\|oGs\|oGs\|oAs\|oA] |
| 4922 | [oTs\|oTs\|oGs\|oTp\|o5mCs\|dGs\|5mCs\|dTs\|dTs\|5mCs\|dTs\|dTs\|5mCs\|dTs\|dGs\|5mCs\|oAp\|oGs\|oGs\|oAs\|oA] |
| 4923 | [oTs\|oTs\|oGs\|oTp\|o5mCs\|dGs\|5mCs\|dTs\|dTs\|5mCs\|dTs\|dTs\|5mCs\|dTs\|dGs\|5mCp\|oAs\|oGs\|oGs\|oAs\|oA] |
| 4924 | [oTs\|oTs\|oGp\|oTs\|o5mCs\|dGs\|5mCs\|dTs\|dTs\|5mCs\|dTs\|dTs\|5mCs\|dTs\|dGs\|5mCp\|oAp\|oGs\|oGs\|oAs\|oA] |
| 4925 | [oTs\|oTs\|oGs\|oTp\|o5mCs\|dGs\|5mCs\|dTs\|dTs\|5mCs\|dTs\|dTs\|5mCs\|dTs\|dGs\|5mCp\|oAp\|oGs\|oGs\|oAs\|oA] |
| 4926 | [oTs\|oTs\|oGp\|oTp\|o5mCs\|dGs\|5mCs\|dTs\|dTs\|5mCs\|dTs\|dTs\|5mCs\|dTs\|dGs\|5mCs\|oAp\|oGs\|oGs\|oAs\|oA] |
| 4927 | [oTs\|oTs\|oGp\|oTp\|o5mCs\|dGs\|5mCs\|dTs\|dTs\|5mCs\|dTs\|dTs\|5mCs\|dTs\|dGs\|5mCp\|oAs\|oGs\|oGs\|oAs\|oA] |
| 4928 | [oTs\|oTs\|oGp\|oTp\|o5mCs\|dGs\|5mCs\|dTs\|dTs\|5mCs\|dTs\|dTs\|5mCs\|dTs\|dGs\|5mCp\|oAp\|oGs\|oGs\|oAs\|oA] |
| 4929 | [oTs\|oTs\|oGs\|oTs\|o5mCs\|dGs\|5mCs\|dTs\|dTs\|5mCs\|dTs\|dTs\|5mCs\|dTs\|dGs\|5mCs\|dAs\|oGs\|oGs\|oAs\|oAs\|o5mC] |
| 4930 | [oTs\|oTs\|oGp\|oTs\|o5mCs\|dGs\|5mCs\|dTs\|dTs\|5mCs\|dTs\|dTs\|5mCs\|dTs\|dGs\|5mCs\|dAs\|oGs\|oGs\|oAs\|oAs\|o5mC] |
| 4931 | [oTs\|oTs\|oGs\|oTp\|o5mCs\|dGs\|5mCs\|dTs\|dTs\|5mCs\|dTs\|dTs\|5mCs\|dTs\|dGs\|5mCs\|dAs\|oGs\|oGs\|oAs\|oAs\|o5mC] |
| 4932 | [oTs\|oTs\|oGp\|oTp\|o5mCs\|dGs\|5mCs\|dTs\|dTs\|5mCs\|dTs\|dTs\|5mCs\|dTs\|dGs\|5mCs\|dAs\|oGs\|oGs\|oAs\|oAs\|o5mC] |
| 4933 | [oTs\|oTs\|oGs\|oTs\|o5mCs\|dGs\|5mCs\|dTs\|dTs\|5mCs\|dTs\|dTs\|5mCs\|dTs\|dGs\|5mCs\|dAp\|oGs\|oGs\|oAs\|oAs\|o5mC] |
| 4934 | [oTs\|oTs\|oGs\|oTs\|o5mCs\|dGs\|5mCs\|dTs\|dTs\|5mCs\|dTs\|dTs\|5mCs\|dTs\|dGs\|5mCp\|dAs\|oGs\|oGs\|oAs\|oAs\|o5mC] |
| 4935 | [oTs\|oTs\|oGs\|oTs\|o5mCs\|dGs\|5mCs\|dTs\|dTs\|5mCs\|dTs\|dTs\|5mCs\|dTs\|dGs\|5mCp\|dAp\|oGs\|oGs\|oAs\|oAs\|o5mC] |
| 4936 | [oTs\|oTs\|oGp\|oTs\|o5mCs\|dGs\|5mCs\|dTs\|dTs\|5mCs\|dTs\|dTs\|5mCs\|dTs\|dGs\|5mCs\|dAp\|oGs\|oGs\|oAs\|oAs\|o5mC] |
| 4937 | [oTs\|oTs\|oGp\|oTs\|o5mCs\|dGs\|5mCs\|dTs\|dTs\|5mCs\|dTs\|dTs\|5mCs\|dTs\|dGs\|5mCp\|dAs\|oGs\|oGs\|oAs\|oAs\|o5mC] |
| 4938 | [oTs\|oTs\|oGs\|oTp\|o5mCs\|dGs\|5mCs\|dTs\|dTs\|5mCs\|dTs\|dTs\|5mCs\|dTs\|dGs\|5mCs\|dAp\|oGs\|oGs\|oAs\|oAs\|o5mC] |
| 4939 | [oTs\|oTs\|oGs\|oTp\|o5mCs\|dGs\|5mCs\|dTs\|dTs\|5mCs\|dTs\|dTs\|5mCs\|dTs\|dGs\|5mCp\|dAs\|oGs\|oGs\|oAs\|oAs\|o5mC] |
| 4940 | [oTs\|oTs\|oGp\|oTs\|o5mCs\|dGs\|5mCs\|dTs\|dTs\|5mCs\|dTs\|dTs\|5mCs\|dTs\|dGs\|5mCp\|dAp\|oGs\|oGs\|oAs\|oAs\|o5mC] |
| 4941 | [oTs\|oTs\|oGs\|oTp\|o5mCs\|dGs\|5mCs\|dTs\|dTs\|5mCs\|dTs\|dTs\|5mCs\|dTs\|dGs\|5mCp\|dAp\|oGs\|oGs\|oAs\|oAs\|o5mC] |
| 4942 | [oTs\|oTs\|oGp\|oTp\|o5mCs\|dGs\|5mCs\|dTs\|dTs\|5mCs\|dTs\|dTs\|5mCs\|dTs\|dGs\|5mCs\|dAp\|oGs\|oGs\|oAs\|oAs\|o5mC] |
| 4943 | [oTs\|oTs\|oGp\|oTp\|o5mCs\|dGs\|5mCs\|dTs\|dTs\|5mCs\|dTs\|dTs\|5mCs\|dTs\|dGs\|5mCp\|dAs\|oGs\|oGs\|oAs\|oAs\|o5mC] |
| 4944 | [oTs\|oTs\|oGp\|oTp\|o5mCs\|dGs\|5mCs\|dTs\|dTs\|5mCs\|dTs\|dTs\|5mCs\|dTs\|dGs\|5mCp\|dAp\|oGs\|oGs\|oAs\|oAs\|o5mC] |
| 4945 | [oTs\|L5mCs\|oTs\|oGs\|oAs\|oTs\|oTs\|oAs\|dTs\|dTs\|dTs\|5mCs\|dTs\|dGs\|5mCs\|dTs\|dGs\|dTs\|oGs\|oT] |
| 4946 | [oTs\|o5mCs\|LTs\|oGs\|oAs\|oTs\|oTs\|oAs\|dTs\|dTs\|dTs\|5mCs\|dTs\|dGs\|5mCs\|dTs\|dGs\|dTs\|oGs\|oT] |
| 4947 | [oTs\|o5mCs\|oTs\|LGs\|oAs\|oTs\|oTs\|oAs\|dTs\|dTs\|dTs\|5mCs\|dTs\|dGs\|5mCs\|dTs\|dGs\|dTs\|oGs\|oT] |
| 4948 | [oTs\|o5mCs\|oTs\|oGs\|LAs\|oTs\|oTs\|oAs\|dTs\|dTs\|dTs\|5mCs\|dTs\|dGs\|5mCs\|dTs\|dGs\|dTs\|oGs\|oT] |
| 4949 | [oTs\|o5mCs\|oTs\|oGs\|oAs\|LTs\|oTs\|oAs\|dTs\|dTs\|dTs\|5mCs\|dTs\|dGs\|5mCs\|dTs\|dGs\|dTs\|oGs\|oT] |
| 4950 | [oTs\|o5mCs\|oTs\|oGs\|oAs\|oTs\|LTs\|oAs\|dTs\|dTs\|dTs\|5mCs\|dTs\|dGs\|5mCs\|dTs\|dGs\|dTs\|oGs\|oT] |
| 4951 | [oTs\|o5mCs\|dTs\|dGs\|dAs\|dTs\|dTs\|dAs\|dTs\|dTs\|dTs\|5mCs\|oTs\|oGs\|o5mCs\|oTs\|oGs\|oTs\|LGs\|oT] |
| 4952 | [oTs\|o5mCs\|dTs\|dGs\|dAs\|dTs\|dTs\|dAs\|dTs\|dTs\|dTs\|5mCs\|oTs\|oGs\|o5mCs\|oTs\|oGs\|LTs\|oGs\|oT] |
| 4953 | [oTs\|o5mCs\|dTs\|dGs\|dAs\|dTs\|dTs\|dAs\|dTs\|dTs\|dTs\|5mCs\|oTs\|oGs\|o5mCs\|oTs\|LGs\|oTs\|oGs\|oT] |
| 4954 | [oTs\|o5mCs\|dTs\|dGs\|dAs\|dTs\|dTs\|dAs\|dTs\|dTs\|dTs\|5mCs\|oTs\|oGs\|o5mCs\|LTs\|oGs\|oTs\|oGs\|oT] |
| 4955 | [oTs\|o5mCs\|dTs\|dGs\|dAs\|dTs\|dTs\|dAs\|dTs\|dTs\|dTs\|5mCs\|oTs\|oGs\|L5mCs\|oTs\|oGs\|oTs\|oGs\|oT] |
| 4956 | [oTs\|o5mCs\|dTs\|dGs\|dAs\|dTs\|dTs\|dAs\|dTs\|dTs\|dTs\|5mCs\|oTs\|LGs\|o5mCs\|oTs\|oGs\|oTs\|oGs\|oT] |
| 4957 | [oTs\|L5mCs\|oTs\|oGs\|oAs\|oTs\|oTs\|dAs\|dTs\|dTs\|dTs\|5mCs\|dTs\|dGs\|5mCs\|dTs\|dGs\|oTs\|oGs\|oT] |
| 4958 | [oTs\|o5mCs\|LTs\|oGs\|oAs\|oTs\|oTs\|dAs\|dTs\|dTs\|dTs\|5mCs\|dTs\|dGs\|5mCs\|dTs\|dGs\|oTs\|oGs\|oT] |
| 4959 | [oTs\|o5mCs\|oTs\|LGs\|oAs\|oTs\|oTs\|dAs\|dTs\|dTs\|dTs\|5mCs\|dTs\|dGs\|5mCs\|dTs\|dGs\|oTs\|oGs\|oT] |
| 4960 | [oTs\|o5mCs\|oTs\|oGs\|LAs\|oTs\|oTs\|dAs\|dTs\|dTs\|dTs\|5mCs\|dTs\|dGs\|5mCs\|dTs\|dGs\|oTs\|oGs\|oT] |
| 4961 | [oTs\|o5mCs\|oTs\|oGs\|oAs\|LTs\|oTs\|dAs\|dTs\|dTs\|dTs\|5mCs\|dTs\|dGs\|5mCs\|dTs\|dGs\|oTs\|oGs\|oT] |
| 4962 | [oTs\|o5mCs\|oTs\|dGs\|dAs\|dTs\|dTs\|dAs\|dTs\|dTs\|dTs\|5mCs\|dTs\|oGs\|o5mCs\|oTs\|oGs\|oTs\|LGs\|oT] |
| 4963 | [oTs\|o5mCs\|oTs\|dGs\|dAs\|dTs\|dTs\|dAs\|dTs\|dTs\|dTs\|5mCs\|dTs\|oGs\|o5mCs\|oTs\|oGs\|LTs\|oGs\|oT] |
| 4964 | [oTs\|o5mCs\|oTs\|dGs\|dAs\|dTs\|dTs\|dAs\|dTs\|dTs\|dTs\|5mCs\|dTs\|oGs\|o5mCs\|oTs\|LGs\|oTs\|oGs\|oT] |
| 4965 | [oTs\|o5mCs\|oTs\|dGs\|dAs\|dTs\|dTs\|dAs\|dTs\|dTs\|dTs\|5mCs\|dTs\|oGs\|o5mCs\|LTs\|oGs\|oTs\|oGs\|oT] |
| 4966 | [oTs\|o5mCs\|oTs\|dGs\|dAs\|dTs\|dTs\|dAs\|dTs\|dTs\|dTs\|5mCs\|dTs\|oGs\|L5mCs\|oTs\|oGs\|oTs\|oGs\|oT] |
| 4967 | [oTs\|L5mCs\|oTs\|oGs\|oAs\|oTs\|oTs\|dAs\|dTs\|dTs\|dTs\|5mCs\|dTs\|dGs\|5mCs\|dTs\|dGs\|oTs\|oG] |
| 4968 | [oTs\|o5mCs\|LTs\|oGs\|oAs\|oTs\|oTs\|dAs\|dTs\|dTs\|dTs\|5mCs\|dTs\|dGs\|5mCs\|dTs\|dGs\|oTs\|oG] |
| 4969 | [oTs\|o5mCs\|oTs\|LGs\|oAs\|oTs\|oTs\|dAs\|dTs\|dTs\|dTs\|5mCs\|dTs\|dGs\|5mCs\|dTs\|dGs\|oTs\|oG] |
| 4970 | [oTs\|o5mCs\|oTs\|oGs\|LAs\|oTs\|oTs\|dAs\|dTs\|dTs\|dTs\|5mCs\|dTs\|dGs\|5mCs\|dTs\|dGs\|oTs\|oG] |
| 4971 | [oTs\|o5mCs\|oTs\|oGs\|oAs\|LTs\|oTs\|dAs\|dTs\|dTs\|dTs\|5mCs\|dTs\|dGs\|5mCs\|dTs\|dGs\|oTs\|oG] |
| 4972 | [o5mCs\|oTs\|dGs\|dAs\|dTs\|dTs\|dAs\|dTs\|dTs\|dTs\|5mCs\|dTs\|oGs\|o5mCs\|oTs\|oGs\|oTs\|LGs\|oT] |
| 4973 | [o5mCs\|oTs\|dGs\|dAs\|dTs\|dTs\|dAs\|dTs\|dTs\|dTs\|5mCs\|dTs\|oGs\|o5mCs\|oTs\|oGs\|LTs\|oGs\|oT] |
| 4974 | [o5mCs\|oTs\|dGs\|dAs\|dTs\|dTs\|dAs\|dTs\|dTs\|dTs\|5mCs\|dTs\|oGs\|o5mCs\|oTs\|LGs\|oTs\|oGs\|oT] |
| 4975 | [o5mCs\|oTs\|dGs\|dAs\|dTs\|dTs\|dAs\|dTs\|dTs\|dTs\|5mCs\|dTs\|oGs\|o5mCs\|LTs\|oGs\|oTs\|oGs\|oT] |
| 4976 | [o5mCs\|oTs\|dGs\|dAs\|dTs\|dTs\|dAs\|dTs\|dTs\|dTs\|5mCs\|dTs\|oGs\|L5mCs\|oTs\|oGs\|oTs\|oGs\|oT] |
| 4977 | [oTs\|L5mCs\|oTs\|oGs\|oAs\|oTs\|dTs\|dAs\|dTs\|dTs\|dTs\|5mCs\|dTs\|dGs\|5mCs\|dTs\|oGs\|oTs\|oGs\|oT] |
| 4978 | [oTs\|o5mCs\|LTs\|oGs\|oAs\|oTs\|dTs\|dAs\|dTs\|dTs\|dTs\|5mCs\|dTs\|dGs\|5mCs\|dTs\|oGs\|oTs\|oGs\|oT] |
| 4979 | [oTs\|o5mCs\|oTs\|LGs\|oAs\|oTs\|dTs\|dAs\|dTs\|dTs\|dTs\|5mCs\|dTs\|dGs\|5mCs\|dTs\|oGs\|oTs\|oGs\|oT] |
| 4980 | [oTs\|o5mCs\|oTs\|oGs\|LAs\|oTs\|dTs\|dAs\|dTs\|dTs\|dTs\|5mCs\|dTs\|dGs\|5mCs\|dTs\|oGs\|oTs\|oGs\|oT] |
| 4981 | [oTs\|o5mCs\|oTs\|oGs\|dAs\|dTs\|dTs\|dAs\|dTs\|dTs\|dTs\|5mCs\|dTs\|dGs\|o5mCs\|oTs\|oGs\|oTs\|LGs\|oT] |
| 4982 | [oTs\|o5mCs\|oTs\|oGs\|dAs\|dTs\|dTs\|dAs\|dTs\|dTs\|dTs\|5mCs\|dTs\|dGs\|o5mCs\|oTs\|oGs\|LTs\|oGs\|oT] |
| 4983 | [oTs\|o5mCs\|oTs\|oGs\|dAs\|dTs\|dTs\|dAs\|dTs\|dTs\|dTs\|5mCs\|dTs\|dGs\|o5mCs\|oTs\|LGs\|oTs\|oGs\|oT] |
| 4984 | [oTs\|o5mCs\|oTs\|oGs\|dAs\|dTs\|dTs\|dAs\|dTs\|dTs\|dTs\|5mCs\|dTs\|dGs\|o5mCs\|LTs\|oGs\|oTs\|oGs\|oT] |
| 4985 | [oTs\|L5mCs\|oTs\|oGs\|oAs\|oTs\|dTs\|dAs\|dTs\|dTs\|dTs\|5mCs\|dTs\|dGs\|5mCs\|dTs\|oGs\|oTs\|oG] |
| 4986 | [oTs\|o5mCs\|LTs\|oGs\|oAs\|oTs\|dTs\|dAs\|dTs\|dTs\|dTs\|5mCs\|dTs\|dGs\|5mCs\|dTs\|oGs\|oTs\|oG] |
| 4987 | [oTs\|o5mCs\|oTs\|LGs\|oAs\|oTs\|dTs\|dAs\|dTs\|dTs\|dTs\|5mCs\|dTs\|dGs\|5mCs\|dTs\|oGs\|oTs\|oG] |
| 4988 | [oTs\|o5mCs\|oTs\|oGs\|LAs\|oTs\|dTs\|dAs\|dTs\|dTs\|dTs\|5mCs\|dTs\|dGs\|5mCs\|dTs\|oGs\|oTs\|oG] |
| 4989 | [oTs\|o5mCs\|oTs\|dGs\|dAs\|dTs\|dTs\|dAs\|dTs\|dTs\|dTs\|5mCs\|dTs\|dGs\|o5mCs\|oTs\|oGs\|oTs\|LGs\|oT] |
| 4990 | [oTs\|o5mCs\|oTs\|dGs\|dAs\|dTs\|dTs\|dAs\|dTs\|dTs\|dTs\|5mCs\|dTs\|dGs\|o5mCs\|oTs\|oGs\|LTs\|oGs\|oT] |
| 4991 | [oTs\|o5mCs\|oTs\|dGs\|dAs\|dTs\|dTs\|dAs\|dTs\|dTs\|dTs\|5mCs\|dTs\|dGs\|o5mCs\|oTs\|LGs\|oTs\|oGs\|oT] |
| 4992 | [oTs\|L5mCs\|oTs\|oGs\|oAs\|oTs\|dTs\|dAs\|dTs\|dTs\|dTs\|5mCs\|dTs\|dGs\|5mCs\|dTs\|oGs\|oT] |
| 4993 | [oTs\|o5mCs\|LTs\|oGs\|oAs\|oTs\|dTs\|dAs\|dTs\|dTs\|dTs\|5mCs\|dTs\|dGs\|5mCs\|dTs\|oGs\|oT] |
| 4994 | [oTs\|o5mCs\|oTs\|LGs\|oAs\|oTs\|dTs\|dAs\|dTs\|dTs\|dTs\|5mCs\|dTs\|dGs\|5mCs\|dTs\|oGs\|oT] |
| 4995 | [oTs\|o5mCs\|oTs\|oGs\|LAs\|oTs\|dTs\|dAs\|dTs\|dTs\|dTs\|5mCs\|dTs\|dGs\|5mCs\|dTs\|oGs\|oT] |
| 4996 | [oTs\|oGs\|dAs\|dTs\|dTs\|dAs\|dTs\|dTs\|dTs\|5mCs\|dTs\|dGs\|o5mCs\|oTs\|oGs\|oTs\|LGs\|oT] |
| 4997 | [oTs\|oGs\|dAs\|dTs\|dTs\|dAs\|dTs\|dTs\|dTs\|5mCs\|dTs\|dGs\|o5mCs\|oTs\|oGs\|LTs\|oGs\|oT] |
| 4998 | [oTs\|oGs\|dAs\|dTs\|dTs\|dAs\|dTs\|dTs\|dTs\|5mCs\|dTs\|dGs\|o5mCs\|oTs\|LGs\|oTs\|oGs\|oT] |
| 4999 | [oTs\|oGs\|dAs\|dTs\|dTs\|dAs\|dTs\|dTs\|dTs\|5mCs\|dTs\|dGs\|o5mCs\|LTs\|oGs\|oTs\|oGs\|oT] |
| 5000 | [oTs\|L5mCs\|oTs\|oGs\|oAs\|dTs\|dTs\|dAs\|dTs\|dTs\|dTs\|5mCs\|dTs\|dGs\|5mCs\|oTs\|oGs\|oTs\|oGs\|oT] |
| 5001 | [oTs\|o5mCs\|LTs\|oGs\|oAs\|dTs\|dTs\|dAs\|dTs\|dTs\|dTs\|5mCs\|dTs\|dGs\|5mCs\|oTs\|oGs\|oTs\|oGs\|oT] |
| 5002 | [oTs\|o5mCs\|oTs\|LGs\|oAs\|dTs\|dTs\|dAs\|dTs\|dTs\|dTs\|5mCs\|dTs\|dGs\|5mCs\|oTs\|oGs\|oTs\|oGs\|oT] |
| 5003 | [oTs\|o5mCs\|oTs\|oGs\|oAs\|dTs\|dTs\|dAs\|dTs\|dTs\|dTs\|5mCs\|dTs\|dGs\|5mCs\|oTs\|oGs\|oTs\|LGs\|oT] |
| 5004 | [oTs\|o5mCs\|oTs\|oGs\|oAs\|dTs\|dTs\|dAs\|dTs\|dTs\|dTs\|5mCs\|dTs\|dGs\|5mCs\|oTs\|oGs\|LTs\|oGs\|oT] |
| 5005 | [oTs\|o5mCs\|oTs\|oGs\|oAs\|dTs\|dTs\|dAs\|dTs\|dTs\|dTs\|5mCs\|dTs\|dGs\|5mCs\|oTs\|LGs\|oTs\|oGs\|oT] |
| 5006 | [oTs\|L5mCs\|oTs\|oGs\|oAs\|dTs\|dTs\|dAs\|dTs\|dTs\|dTs\|5mCs\|dTs\|dGs\|5mCs\|oTs\|oGs\|oTs\|oG] |
| 5007 | [oTs\|o5mCs\|LTs\|oGs\|oAs\|dTs\|dTs\|dAs\|dTs\|dTs\|dTs\|5mCs\|dTs\|dGs\|5mCs\|oTs\|oGs\|oTs\|oG] |
| 5008 | [oTs\|o5mCs\|oTs\|LGs\|oAs\|dTs\|dTs\|dAs\|dTs\|dTs\|dTs\|5mCs\|dTs\|dGs\|5mCs\|oTs\|oGs\|oTs\|oG] |
| 5009 | [o5mCs\|oTs\|oGs\|oAs\|dTs\|dTs\|dAs\|dTs\|dTs\|dTs\|5mCs\|dTs\|dGs\|5mCs\|oTs\|oGs\|oTs\|LGs\|oT] |
| 5010 | [o5mCs\|oTs\|oGs\|oAs\|dTs\|dTs\|dAs\|dTs\|dTs\|dTs\|5mCs\|dTs\|dGs\|5mCs\|oTs\|oGs\|LTs\|oGs\|oT] |
| 5011 | [o5mCs\|oTs\|oGs\|oAs\|dTs\|dTs\|dAs\|dTs\|dTs\|dTs\|5mCs\|dTs\|dGs\|5mCs\|oTs\|LGs\|oTs\|oGs\|oT] |
| 5012 | [oTs\|L5mCs\|oTs\|oGs\|oAs\|dTs\|dTs\|dAs\|dTs\|dTs\|dTs\|5mCs\|dTs\|dGs\|5mCs\|oTs\|oGs\|oT] |
| 5013 | [oTs\|o5mCs\|LTs\|oGs\|oAs\|dTs\|dTs\|dAs\|dTs\|dTs\|dTs\|5mCs\|dTs\|dGs\|5mCs\|oTs\|oGs\|oT] |
| 5014 | [oTs\|o5mCs\|oTs\|LGs\|oAs\|dTs\|dTs\|dAs\|dTs\|dTs\|dTs\|5mCs\|dTs\|dGs\|5mCs\|oTs\|oGs\|oT] |
| 5015 | [oTs\|oGs\|oAs\|dTs\|dTs\|dAs\|dTs\|dTs\|dTs\|5mCs\|dTs\|dGs\|5mCs\|oTs\|oGs\|oTs\|LGs\|oT] |
| 5016 | [oTs\|oGs\|oAs\|dTs\|dTs\|dAs\|dTs\|dTs\|dTs\|5mCs\|dTs\|dGs\|5mCs\|oTs\|oGs\|LTs\|oGs\|oT] |
| 5017 | [oTs\|oGs\|oAs\|dTs\|dTs\|dAs\|dTs\|dTs\|dTs\|5mCs\|dTs\|dGs\|5mCs\|oTs\|LGs\|oTs\|oGs\|oT] |
| 5018 | [oTs\|L5mCs\|oTs\|oGs\|oAs\|dTs\|dTs\|dAs\|dTs\|dTs\|dTs\|5mCs\|dTs\|dGs\|5mCs\|oTs\|oG] |
| 5019 | [oTs\|o5mCs\|LTs\|oGs\|oAs\|dTs\|dTs\|dAs\|dTs\|dTs\|dTs\|5mCs\|dTs\|dGs\|5mCs\|oTs\|oG] |
| 5020 | [oTs\|o5mCs\|oTs\|LGs\|oAs\|dTs\|dTs\|dAs\|dTs\|dTs\|dTs\|5mCs\|dTs\|dGs\|5mCs\|oTs\|oG] |
| 5021 | [oGs\|oAs\|dTs\|dTs\|dAs\|dTs\|dTs\|dTs\|5mCs\|dTs\|dGs\|5mCs\|oTs\|oGs\|oTs\|LGs\|oT] |
| 5022 | [oGs\|oAs\|dTs\|dTs\|dAs\|dTs\|dTs\|dTs\|5mCs\|dTs\|dGs\|5mCs\|oTs\|oGs\|LTs\|oGs\|oT] |
| 5023 | [oGs\|oAs\|dTs\|dTs\|dAs\|dTs\|dTs\|dTs\|5mCs\|dTs\|dGs\|5mCs\|oTs\|LGs\|oTs\|oGs\|oT] |
| 5024 | [o5mCs\|LTs\|oGs\|oAs\|dTs\|dTs\|dAs\|dTs\|dTs\|dTs\|5mCs\|dTs\|dGs\|5mCs\|oTs\|oGs\|oTs\|oGs\|oT] |
| 5025 | [o5mCs\|oTs\|LGs\|oAs\|dTs\|dTs\|dAs\|dTs\|dTs\|dTs\|5mCs\|dTs\|dGs\|5mCs\|oTs\|oGs\|oTs\|oGs\|oT] |
| 5026 | [oTs\|o5mCs\|oTs\|oGs\|oAs\|dTs\|dTs\|dAs\|dTs\|dTs\|dTs\|5mCs\|dTs\|dGs\|5mCs\|oTs\|oGs\|LTs\|oG] |
| 5027 | [oTs\|o5mCs\|oTs\|oGs\|oAs\|dTs\|dTs\|dAs\|dTs\|dTs\|dTs\|5mCs\|dTs\|dGs\|5mCs\|oTs\|LGs\|oTs\|oG] |
| 5028 | [o5mCs\|LTs\|oGs\|oAs\|dTs\|dTs\|dAs\|dTs\|dTs\|dTs\|5mCs\|dTs\|dGs\|5mCs\|oTs\|oGs\|oTs\|oG] |
| 5029 | [o5mCs\|oTs\|LGs\|oAs\|dTs\|dTs\|dAs\|dTs\|dTs\|dTs\|5mCs\|dTs\|dGs\|5mCs\|oTs\|oGs\|oTs\|oG] |
| 5030 | [o5mCs\|oTs\|oGs\|oAs\|dTs\|dTs\|dAs\|dTs\|dTs\|dTs\|5mCs\|dTs\|dGs\|5mCs\|oTs\|oGs\|LTs\|oG] |
| 5031 | [o5mCs\|oTs\|oGs\|oAs\|dTs\|dTs\|dAs\|dTs\|dTs\|dTs\|5mCs\|dTs\|dGs\|5mCs\|oTs\|LGs\|oTs\|oG] |
| 5032 | [o5mCs\|LTs\|oGs\|oAs\|dTs\|dTs\|dAs\|dTs\|dTs\|dTs\|5mCs\|dTs\|dGs\|5mCs\|oTs\|oGs\|oT] |
| 5033 | [o5mCs\|oTs\|LGs\|oAs\|dTs\|dTs\|dAs\|dTs\|dTs\|dTs\|5mCs\|dTs\|dGs\|5mCs\|oTs\|oGs\|oT] |
| 5034 | [o5mCs\|oTs\|oGs\|oAs\|dTs\|dTs\|dAs\|dTs\|dTs\|dTs\|5mCs\|dTs\|dGs\|5mCs\|oTs\|LGs\|oT] |
| 5035 | [oTs\|o5mCs\|oTs\|oGs\|oAs\|oTs\|oTs\|oAs\|dTs\|dTs\|dTs\|5mCs\|dTs\|dGs\|5mCs\|dTs\|dGs\|dTs\|oGs\|oT] |
| 5036 | [oTs\|o5mCs\|dTs\|dGs\|dAs\|dTs\|dTs\|dAs\|dTs\|dTs\|dTs\|5mCs\|oTs\|oGs\|o5mCs\|oTs\|oGs\|oTs\|oGs\|oT] |
| 5037 | [oTs\|o5mCs\|oTs\|oGs\|oAs\|oTs\|oTs\|dAs\|dTs\|dTs\|dTs\|5mCs\|dTs\|dGs\|5mCs\|dTs\|dGs\|oTs\|oGs\|oT] |
| 5038 | [oTs\|o5mCs\|oTs\|dGs\|dAs\|dTs\|dTs\|dAs\|dTs\|dTs\|dTs\|5mCs\|dTs\|oGs\|o5mCs\|oTs\|oGs\|oTs\|oGs\|oT] |
| 5039 | [oTs\|o5mCs\|oTs\|oGs\|oAs\|oTs\|oTs\|dAs\|dTs\|dTs\|dTs\|5mCs\|dTs\|dGs\|5mCs\|dTs\|dGs\|oTs\|oG] |
| 5040 | [o5mCs\|oTs\|dGs\|dAs\|dTs\|dTs\|dAs\|dTs\|dTs\|dTs\|5mCs\|dTs\|oGs\|o5mCs\|oTs\|oGs\|oTs\|oGs\|oT] |
| 5041 | [oTs\|o5mCs\|oTs\|oGs\|oAs\|oTs\|dTs\|dAs\|dTs\|dTs\|dTs\|5mCs\|dTs\|dGs\|5mCs\|dTs\|oGs\|oTs\|oGs\|oT] |
| 5042 | [oTs\|o5mCs\|oTs\|oGs\|dAs\|dTs\|dTs\|dAs\|dTs\|dTs\|dTs\|5mCs\|dTs\|dGs\|o5mCs\|oTs\|oGs\|oTs\|oGs\|oT] |
| 5043 | [oTs\|o5mCs\|oTs\|oGs\|oAs\|oTs\|dTs\|dAs\|dTs\|dTs\|dTs\|5mCs\|dTs\|dGs\|5mCs\|dTs\|oGs\|oTs\|oG] |
| 5044 | [oTs\|o5mCs\|oTs\|dGs\|dAs\|dTs\|dTs\|dAs\|dTs\|dTs\|dTs\|5mCs\|dTs\|dGs\|o5mCs\|oTs\|oGs\|oTs\|oGs\|oT] |
| 5045 | [oTs\|o5mCs\|oTs\|oGs\|oAs\|oTs\|dTs\|dAs\|dTs\|dTs\|dTs\|5mCs\|dTs\|dGs\|5mCs\|dTs\|oGs\|oT] |
| 5046 | [oTs\|oGs\|dAs\|dTs\|dTs\|dAs\|dTs\|dTs\|dTs\|5mCs\|dTs\|dGs\|o5mCs\|oTs\|oGs\|oTs\|oGs\|oT] |
| 5047 | [oTs\|o5mCs\|oTs\|oGs\|oAs\|dTs\|dTs\|dAs\|dTs\|dTs\|dTs\|5mCs\|dTs\|dGs\|5mCs\|oTs\|oGs\|oTs\|oGs\|oT] |
| 5048 | [oTs\|o5mCs\|oTs\|oGs\|oAs\|dTs\|dTs\|dAs\|dTs\|dTs\|dTs\|5mCs\|dTs\|dGs\|5mCs\|oTs\|oGs\|oTs\|oG] |
| 5049 | [oTs\|o5mCs\|oTs\|oGs\|oAs\|dTs\|dTs\|dAs\|dTs\|dTs\|dTs\|5mCs\|dTs\|dGs\|5mCs\|oTs\|oGs\|oT] |
| 5050 | [oTs\|oGs\|oAs\|dTs\|dTs\|dAs\|dTs\|dTs\|dTs\|5mCs\|dTs\|dGs\|5mCs\|oTs\|oGs\|oTs\|oGs\|oT] |
| 5051 | [oTs\|o5mCs\|oTs\|oGs\|oAs\|dTs\|dTs\|dAs\|dTs\|dTs\|dTs\|5mCs\|dTs\|dGs\|5mCs\|oTs\|oG] |
| 5052 | [oGs\|oAs\|dTs\|dTs\|dAs\|dTs\|dTs\|dTs\|5mCs\|dTs\|dGs\|5mCs\|oTs\|oGs\|oTs\|oGs\|oT] |
| 5053 | [o5mCs\|oTs\|oGs\|oAs\|dTs\|dTs\|dAs\|dTs\|dTs\|dTs\|5mCs\|dTs\|dGs\|5mCs\|oTs\|oGs\|oTs\|oGs\|oT] |
| 5054 | [o5mCs\|oTs\|oGs\|oAs\|dTs\|dTs\|dAs\|dTs\|dTs\|dTs\|5mCs\|dTs\|dGs\|5mCs\|oTs\|oGs\|oTs\|oG] |
| 5055 | [o5mCs\|oTs\|oGs\|oAs\|dTs\|dTs\|dAs\|dTs\|dTs\|dTs\|5mCs\|dTs\|dGs\|5mCs\|oTs\|oGs\|oT] |
| 5056 | [oTs\|o5mCs\|oTp\|oGs\|oAs\|dTs\|dTs\|dAs\|dTs\|dTs\|dTs\|5mCs\|dTs\|dGs\|5mCs\|oTs\|oGs\|oTs\|oGs\|oT] |
| 5057 | [oTs\|o5mCs\|oTs\|oGp\|oAs\|dTs\|dTs\|dAs\|dTs\|dTs\|dTs\|5mCs\|dTs\|dGs\|5mCs\|oTs\|oGs\|oTs\|oGs\|oT] |
| 5058 | [oTs\|o5mCs\|oTp\|oGp\|oAs\|dTs\|dTs\|dAs\|dTs\|dTs\|dTs\|5mCs\|dTs\|dGs\|5mCs\|oTs\|oGs\|oTs\|oGs\|oT] |
| 5059 | [oTs\|o5mCs\|oTs\|oGs\|oAs\|dTs\|dTs\|dAs\|dTs\|dTs\|dTs\|5mCs\|dTs\|dGs\|5mCs\|oTs\|oGp\|oTs\|oGs\|oT] |
| 5060 | [oTs\|o5mCs\|oTs\|oGs\|oAs\|dTs\|dTs\|dAs\|dTs\|dTs\|dTs\|5mCs\|dTs\|dGs\|5mCs\|oTp\|oGs\|oTs\|oGs\|oT] |
| 5061 | [oTs\|o5mCs\|oTs\|oGs\|oAs\|dTs\|dTs\|dAs\|dTs\|dTs\|dTs\|5mCs\|dTs\|dGs\|5mCs\|oTp\|oGp\|oTs\|oGs\|oT] |
| 5062 | [oTs\|o5mCs\|oTp\|oGs\|oAs\|dTs\|dTs\|dAs\|dTs\|dTs\|dTs\|5mCs\|dTs\|dGs\|5mCs\|oTs\|oGp\|oTs\|oGs\|oT] |
| 5063 | [oTs\|o5mCs\|oTp\|oGs\|oAs\|dTs\|dTs\|dAs\|dTs\|dTs\|dTs\|5mCs\|dTs\|dGs\|5mCs\|oTp\|oGs\|oTs\|oGs\|oT] |
| 5064 | [oTs\|o5mCs\|oTs\|oGp\|oAs\|dTs\|dTs\|dAs\|dTs\|dTs\|dTs\|5mCs\|dTs\|dGs\|5mCs\|oTs\|oGp\|oTs\|oGs\|oT] |
| 5065 | [oTs\|o5mCs\|oTs\|oGp\|oAs\|dTs\|dTs\|dAs\|dTs\|dTs\|dTs\|5mCs\|dTs\|dGs\|5mCs\|oTp\|oGs\|oTs\|oGs\|oT] |
| 5066 | [oTs\|o5mCs\|oTp\|oGs\|oAs\|dTs\|dTs\|dAs\|dTs\|dTs\|dTs\|5mCs\|dTs\|dGs\|5mCs\|oTp\|oGp\|oTs\|oGs\|oT] |
| 5067 | [oTs\|o5mCs\|oTs\|oGp\|oAs\|dTs\|dTs\|dAs\|dTs\|dTs\|dTs\|5mCs\|dTs\|dGs\|5mCs\|oTp\|oGp\|oTs\|oGs\|oT] |
| 5068 | [oTs\|o5mCs\|oTp\|oGp\|oAs\|dTs\|dTs\|dAs\|dTs\|dTs\|dTs\|5mCs\|dTs\|dGs\|5mCs\|oTs\|oGp\|oTs\|oGs\|oT] |
| 5069 | [oTs\|o5mCs\|oTp\|oGp\|oAs\|dTs\|dTs\|dAs\|dTs\|dTs\|dTs\|5mCs\|dTs\|dGs\|5mCs\|oTp\|oGs\|oTs\|oGs\|oT] |
| 5070 | [oTs\|o5mCs\|oTp\|oGp\|oAs\|dTs\|dTs\|dAs\|dTs\|dTs\|dTs\|5mCs\|dTs\|dGs\|5mCs\|oTp\|oGp\|oTs\|oGs\|oT] |
| 5071 | [oTs\|o5mCs\|oTs\|oGs\|oAs\|dTs\|dTs\|dAs\|dTs\|dTs\|dTs\|5mCs\|dTs\|dGs\|5mCs\|oTs\|oGs\|oTs\|oGs\|oTs\|o5mC] |
| 5072 | [oTs\|o5mCs\|oTp\|oGs\|oAs\|dTs\|dTs\|dAs\|dTs\|dTs\|dTs\|5mCs\|dTs\|dGs\|5mCs\|oTs\|oGs\|oTs\|oGs\|oTs\|o5mC] |
| 5073 | [oTs\|o5mCs\|oTs\|oGp\|oAs\|dTs\|dTs\|dAs\|dTs\|dTs\|dTs\|5mCs\|dTs\|dGs\|5mCs\|oTs\|oGs\|oTs\|oGs\|oTs\|o5mC] |
| 5074 | [oTs\|o5mCs\|oTp\|oGp\|oAs\|dTs\|dTs\|dAs\|dTs\|dTs\|dTs\|5mCs\|dTs\|dGs\|5mCs\|oTs\|oGs\|oTs\|oGs\|oTs\|o5mC] |
| 5075 | [oTs\|o5mCs\|oTs\|oGs\|oAs\|dTs\|dTs\|dAs\|dTs\|dTs\|dTs\|5mCs\|dTs\|dGs\|5mCs\|oTs\|oGp\|oTs\|oGs\|oTs\|o5mC] |
| 5076 | [oTs\|o5mCs\|oTs\|oGs\|oAs\|dTs\|dTs\|dAs\|dTs\|dTs\|dTs\|5mCs\|dTs\|dGs\|5mCs\|oTp\|oGs\|oTs\|oGs\|oTs\|o5mC] |
| 5077 | [oTs\|o5mCs\|oTs\|oGs\|oAs\|dTs\|dTs\|dAs\|dTs\|dTs\|dTs\|5mCs\|dTs\|dGs\|5mCs\|oTp\|oGp\|oTs\|oGs\|oTs\|o5mC] |
| 5078 | [oTs\|o5mCs\|oTp\|oGs\|oAs\|dTs\|dTs\|dAs\|dTs\|dTs\|dTs\|5mCs\|dTs\|dGs\|5mCs\|oTs\|oGp\|oTs\|oGs\|oTs\|o5mC] |
| 5079 | [oTs\|o5mCs\|oTp\|oGs\|oAs\|dTs\|dTs\|dAs\|dTs\|dTs\|dTs\|5mCs\|dTs\|dGs\|5mCs\|oTp\|oGs\|oTs\|oGs\|oTs\|o5mC] |
| 5080 | [oTs\|o5mCs\|oTs\|oGp\|oAs\|dTs\|dTs\|dAs\|dTs\|dTs\|dTs\|5mCs\|dTs\|dGs\|5mCs\|oTs\|oGp\|oTs\|oGs\|oTs\|o5mC] |
| 5081 | [oTs\|o5mCs\|oTs\|oGp\|oAs\|dTs\|dTs\|dAs\|dTs\|dTs\|dTs\|5mCs\|dTs\|dGs\|5mCs\|oTp\|oGs\|oTs\|oGs\|oTs\|o5mC] |
| 5082 | [oTs\|o5mCs\|oTp\|oGs\|oAs\|dTs\|dTs\|dAs\|dTs\|dTs\|dTs\|5mCs\|dTs\|dGs\|5mCs\|oTp\|oGp\|oTs\|oGs\|oTs\|o5mC] |
| 5083 | [oTs\|o5mCs\|oTs\|oGp\|oAs\|dTs\|dTs\|dAs\|dTs\|dTs\|dTs\|5mCs\|dTs\|dGs\|5mCs\|oTp\|oGp\|oTs\|oGs\|oTs\|o5mC] |
| 5084 | [oTs\|o5mCs\|oTp\|oGp\|oAs\|dTs\|dTs\|dAs\|dTs\|dTs\|dTs\|5mCs\|dTs\|dGs\|5mCs\|oTs\|oGp\|oTs\|oGs\|oTs\|o5mC] |
| 5085 | [oTs\|o5mCs\|oTp\|oGp\|oAs\|dTs\|dTs\|dAs\|dTs\|dTs\|dTs\|5mCs\|dTs\|dGs\|5mCs\|oTp\|oGs\|oTs\|oGs\|oTs\|o5mC] |
| 5086 | [oTs\|o5mCs\|oTp\|oGp\|oAs\|dTs\|dTs\|dAs\|dTs\|dTs\|dTs\|5mCs\|dTs\|dGs\|5mCs\|oTp\|oGp\|oTs\|oGs\|oTs\|o5mC] |
| 5087 | [oTs\|o5mCs\|oTs\|oGs\|oAs\|dTs\|dTs\|dAs\|dTs\|dTs\|dTs\|5mCs\|dTs\|dGs\|5mCs\|oTs\|oGs\|oTs\|oGs\|oTs\|o5mCs\|oA] |
| 5088 | [oTs\|o5mCs\|oTp\|oGs\|oAs\|dTs\|dTs\|dAs\|dTs\|dTs\|dTs\|5mCs\|dTs\|dGs\|5mCs\|oTs\|oGs\|oTs\|oGs\|oTs\|o5mCs\|oA] |
| 5089 | [oTs\|o5mCs\|oTs\|oGp\|oAs\|dTs\|dTs\|dAs\|dTs\|dTs\|dTs\|5mCs\|dTs\|dGs\|5mCs\|oTs\|oGs\|oTs\|oGs\|oTs\|o5mCs\|oA] |
| 5090 | [oTs\|o5mCs\|oTp\|oGp\|oAs\|dTs\|dTs\|dAs\|dTs\|dTs\|dTs\|5mCs\|dTs\|dGs\|5mCs\|oTs\|oGs\|oTs\|oGs\|oTs\|o5mCs\|oA] |
| 5091 | [oTs\|o5mCs\|oTs\|oGs\|oAs\|dTs\|dTs\|dAs\|dTs\|dTs\|dTs\|5mCs\|dTs\|dGs\|5mCs\|oTs\|oGp\|oTs\|oGs\|oTs\|o5mCs\|oA] |
| 5092 | [oTs\|o5mCs\|oTs\|oGs\|oAs\|dTs\|dTs\|dAs\|dTs\|dTs\|dTs\|5mCs\|dTs\|dGs\|5mCs\|oTp\|oGs\|oTs\|oGs\|oTs\|o5mCs\|oA] |
| 5093 | [oTs\|o5mCs\|oTs\|oGs\|oAs\|dTs\|dTs\|dAs\|dTs\|dTs\|dTs\|5mCs\|dTs\|dGs\|5mCs\|oTp\|oGp\|oTs\|oGs\|oTs\|o5mCs\|oA] |
| 5094 | [oTs\|o5mCs\|oTp\|oGs\|oAs\|dTs\|dTs\|dAs\|dTs\|dTs\|dTs\|5mCs\|dTs\|dGs\|5mCs\|oTs\|oGp\|oTs\|oGs\|oTs\|o5mCs\|oA] |
| 5095 | [oTs\|o5mCs\|oTp\|oGs\|oAs\|dTs\|dTs\|dAs\|dTs\|dTs\|dTs\|5mCs\|dTs\|dGs\|5mCs\|oTp\|oGs\|oTs\|oGs\|oTs\|o5mCs\|oA] |
| 5096 | [oTs\|o5mCs\|oTs\|oGp\|oAs\|dTs\|dTs\|dAs\|dTs\|dTs\|dTs\|5mCs\|dTs\|dGs\|5mCs\|oTs\|oGp\|oTs\|oGs\|oTs\|o5mCs\|oA] |
| 5097 | [oTs\|o5mCs\|oTs\|oGp\|oAs\|dTs\|dTs\|dAs\|dTs\|dTs\|dTs\|5mCs\|dTs\|dGs\|5mCs\|oTp\|oGs\|oTs\|oGs\|oTs\|o5mCs\|oA] |
| 5098 | [oTs\|o5mCs\|oTp\|oGs\|oAs\|dTs\|dTs\|dAs\|dTs\|dTs\|dTs\|5mCs\|dTs\|dGs\|5mCs\|oTp\|oGp\|oTs\|oGs\|oTs\|o5mCs\|oA] |
| 5099 | [oTs\|o5mCs\|oTs\|oGp\|oAs\|dTs\|dTs\|dAs\|dTs\|dTs\|dTs\|5mCs\|dTs\|dGs\|5mCs\|oTp\|oGp\|oTs\|oGs\|oTs\|o5mCs\|oA] |
| 5100 | [oTs\|o5mCs\|oTp\|oGp\|oAs\|dTs\|dTs\|dAs\|dTs\|dTs\|dTs\|5mCs\|dTs\|dGs\|5mCs\|oTs\|oGp\|oTs\|oGs\|oTs\|o5mCs\|oA] |
| 5101 | [oTs\|o5mCs\|oTp\|oGp\|oAs\|dTs\|dTs\|dAs\|dTs\|dTs\|dTs\|5mCs\|dTs\|dGs\|5mCs\|oTp\|oGs\|oTs\|oGs\|oTs\|o5mCs\|oA] |
| 5102 | [oTs\|o5mCs\|oTp\|oGp\|oAs\|dTs\|dTs\|dAs\|dTs\|dTs\|dTs\|5mCs\|dTs\|dGs\|5mCs\|oTp\|oGp\|oTs\|oGs\|oTs\|o5mCs\|oA] |
| 5103 | [oTs\|o5mCs\|oTs\|oGs\|oAs\|dTs\|dTs\|dAs\|dTs\|dTs\|dTs\|5mCs\|dTs\|dGs\|5mCs\|oTs\|oGs\|oTs\|oGs\|oTs\|o5mCs\|oAs\|oG] |
| 5104 | [oTs\|o5mCs\|oTp\|oGs\|oAs\|dTs\|dTs\|dAs\|dTs\|dTs\|dTs\|5mCs\|dTs\|dGs\|5mCs\|oTs\|oGs\|oTs\|oGs\|oTs\|o5mCs\|oAs\|oG] |
| 5105 | [oTs\|o5mCs\|oTs\|oGp\|oAs\|dTs\|dTs\|dAs\|dTs\|dTs\|dTs\|5mCs\|dTs\|dGs\|5mCs\|oTs\|oGs\|oTs\|oGs\|oTs\|o5mCs\|oAs\|oG] |
| 5106 | [oTs\|o5mCs\|oTp\|oGp\|oAs\|dTs\|dTs\|dAs\|dTs\|dTs\|dTs\|5mCs\|dTs\|dGs\|5mCs\|oTs\|oGs\|oTs\|oGs\|oTs\|o5mCs\|oAs\|oG] |
| 5107 | [oTs\|o5mCs\|oTs\|oGs\|oAs\|dTs\|dTs\|dAs\|dTs\|dTs\|dTs\|5mCs\|dTs\|dGs\|5mCs\|oTs\|oGp\|oTs\|oGs\|oTs\|o5mCs\|oAs\|oG] |
| 5108 | [oTs\|o5mCs\|oTs\|oGs\|oAs\|dTs\|dTs\|dAs\|dTs\|dTs\|dTs\|5mCs\|dTs\|dGs\|5mCs\|oTp\|oGs\|oTs\|oGs\|oTs\|o5mCs\|oAs\|oG] |
| 5109 | [oTs\|o5mCs\|oTs\|oGs\|oAs\|dTs\|dTs\|dAs\|dTs\|dTs\|dTs\|5mCs\|dTs\|dGs\|5mCs\|oTp\|oGp\|oTs\|oGs\|oTs\|o5mCs\|oAs\|oG] |
| 5110 | [oTs\|o5mCs\|oTp\|oGs\|oAs\|dTs\|dTs\|dAs\|dTs\|dTs\|dTs\|5mCs\|dTs\|dGs\|5mCs\|oTs\|oGp\|oTs\|oGs\|oTs\|o5mCs\|oAs\|oG] |
| 5111 | [oTs\|o5mCs\|oTp\|oGs\|oAs\|dTs\|dTs\|dAs\|dTs\|dTs\|dTs\|5mCs\|dTs\|dGs\|5mCs\|oTp\|oGs\|oTs\|oGs\|oTs\|o5mCs\|oAs\|oG] |
| 5112 | [oTs\|o5mCs\|oTs\|oGp\|oAs\|dTs\|dTs\|dAs\|dTs\|dTs\|dTs\|5mCs\|dTs\|dGs\|5mCs\|oTs\|oGp\|oTs\|oGs\|oTs\|o5mCs\|oAs\|oG] |
| 5113 | [oTs\|o5mCs\|oTs\|oGp\|oAs\|dTs\|dTs\|dAs\|dTs\|dTs\|dTs\|5mCs\|dTs\|dGs\|5mCs\|oTp\|oGs\|oTs\|oGs\|oTs\|o5mCs\|oAs\|oG] |
| 5114 | [oTs\|o5mCs\|oTp\|oGs\|oAs\|dTs\|dTs\|dAs\|dTs\|dTs\|dTs\|5mCs\|dTs\|dGs\|5mCs\|oTp\|oGp\|oTs\|oGs\|oTs\|o5mCs\|oAs\|oG] |
| 5115 | [oTs\|o5mCs\|oTs\|oGp\|oAs\|dTs\|dTs\|dAs\|dTs\|dTs\|dTs\|5mCs\|dTs\|dGs\|5mCs\|oTp\|oGp\|oTs\|oGs\|oTs\|o5mCs\|oAs\|oG] |
| 5116 | [oTs\|o5mCs\|oTp\|oGp\|oAs\|dTs\|dTs\|dAs\|dTs\|dTs\|dTs\|5mCs\|dTs\|dGs\|5mCs\|oTs\|oGp\|oTs\|oGs\|oTs\|o5mCs\|oAs\|oG] |
| 5117 | [oTs\|o5mCs\|oTp\|oGp\|oAs\|dTs\|dTs\|dAs\|dTs\|dTs\|dTs\|5mCs\|dTs\|dGs\|5mCs\|oTp\|oGs\|oTs\|oGs\|oTs\|o5mCs\|oAs\|oG] |
| 5118 | [oTs\|o5mCs\|oTp\|oGp\|oAs\|dTs\|dTs\|dAs\|dTs\|dTs\|dTs\|5mCs\|dTs\|dGs\|5mCs\|oTp\|oGp\|oTs\|oGs\|oTs\|o5mCs\|oAs\|oG] |
| 5119 | [oTs\|o5mCs\|oTs\|oGs\|oAs\|dTs\|dTs\|dAs\|dTs\|dTs\|dTs\|5mCs\|dTs\|dGs\|5mCs\|dTs\|oGs\|oTs\|oGs\|oTs\|o5mC] |
| 5120 | [oTs\|o5mCs\|oTp\|oGs\|oAs\|dTs\|dTs\|dAs\|dTs\|dTs\|dTs\|5mCs\|dTs\|dGs\|5mCs\|dTs\|oGs\|oTs\|oGs\|oTs\|o5mC] |
| 5121 | [oTs\|o5mCs\|oTs\|oGp\|oAs\|dTs\|dTs\|dAs\|dTs\|dTs\|dTs\|5mCs\|dTs\|dGs\|5mCs\|dTs\|oGs\|oTs\|oGs\|oTs\|o5mC] |
| 5122 | [oTs\|o5mCs\|oTp\|oGp\|oAs\|dTs\|dTs\|dAs\|dTs\|dTs\|dTs\|5mCs\|dTs\|dGs\|5mCs\|dTs\|oGs\|oTs\|oGs\|oTs\|o5mC] |
| 5123 | [oTs\|o5mCs\|oTs\|oGs\|oAs\|dTs\|dTs\|dAs\|dTs\|dTs\|dTs\|5mCs\|dTs\|dGs\|5mCs\|dTs\|oGp\|oTs\|oGs\|oTs\|o5mC] |
| 5124 | [oTs\|o5mCs\|oTs\|oGs\|oAs\|dTs\|dTs\|dAs\|dTs\|dTs\|dTs\|5mCs\|dTs\|dGs\|5mCs\|dTp\|oGs\|oTs\|oGs\|oTs\|o5mC] |
| 5125 | [oTs\|o5mCs\|oTs\|oGs\|oAs\|dTs\|dTs\|dAs\|dTs\|dTs\|dTs\|5mCs\|dTs\|dGs\|5mCs\|dTp\|oGp\|oTs\|oGs\|oTs\|o5mC] |
| 5126 | [oTs\|o5mCs\|oTp\|oGs\|oAs\|dTs\|dTs\|dAs\|dTs\|dTs\|dTs\|5mCs\|dTs\|dGs\|5mCs\|dTs\|oGp\|oTs\|oGs\|oTs\|o5mC] |
| 5127 | [oTs\|o5mCs\|oTp\|oGs\|oAs\|dTs\|dTs\|dAs\|dTs\|dTs\|dTs\|5mCs\|dTs\|dGs\|5mCs\|dTp\|oGs\|oTs\|oGs\|oTs\|o5mC] |
| 5128 | [oTs\|o5mCs\|oTs\|oGp\|oAs\|dTs\|dTs\|dAs\|dTs\|dTs\|dTs\|5mCs\|dTs\|dGs\|5mCs\|dTs\|oGp\|oTs\|oGs\|oTs\|o5mC] |
| 5129 | [oTs\|o5mCs\|oTs\|oGp\|oAs\|dTs\|dTs\|dAs\|dTs\|dTs\|dTs\|5mCs\|dTs\|dGs\|5mCs\|dTp\|oGs\|oTs\|oGs\|oTs\|o5mC] |
| 5130 | [oTs\|o5mCs\|oTp\|oGs\|oAs\|dTs\|dTs\|dAs\|dTs\|dTs\|dTs\|5mCs\|dTs\|dGs\|5mCs\|dTp\|oGp\|oTs\|oGs\|oTs\|o5mC] |
| 5131 | [oTs\|o5mCs\|oTs\|oGp\|oAs\|dTs\|dTs\|dAs\|dTs\|dTs\|dTs\|5mCs\|dTs\|dGs\|5mCs\|dTp\|oGp\|oTs\|oGs\|oTs\|o5mC] |
| 5132 | [oTs\|o5mCs\|oTp\|oGp\|oAs\|dTs\|dTs\|dAs\|dTs\|dTs\|dTs\|5mCs\|dTs\|dGs\|5mCs\|dTs\|oGp\|oTs\|oGs\|oTs\|o5mC] |
| 5133 | [oTs\|o5mCs\|oTp\|oGp\|oAs\|dTs\|dTs\|dAs\|dTs\|dTs\|dTs\|5mCs\|dTs\|dGs\|5mCs\|dTp\|oGs\|oTs\|oGs\|oTs\|o5mC] |
| 5134 | [oTs\|o5mCs\|oTp\|oGp\|oAs\|dTs\|dTs\|dAs\|dTs\|dTs\|dTs\|5mCs\|dTs\|dGs\|5mCs\|dTp\|oGp\|oTs\|oGs\|oTs\|o5mC] |
| 5135 | [oTs\|o5mCs\|oTs\|oGs\|oAs\|dTs\|dTs\|dAs\|dTs\|dTs\|dTs\|5mCs\|dTs\|dGs\|5mCs\|dTs\|dGs\|oTs\|oGs\|oTs\|o5mCs\|oA] |
| 5136 | [oTs\|o5mCs\|oTp\|oGs\|oAs\|dTs\|dTs\|dAs\|dTs\|dTs\|dTs\|5mCs\|dTs\|dGs\|5mCs\|dTs\|dGs\|oTs\|oGs\|oTs\|o5mCs\|oA] |
| 5137 | [oTs\|o5mCs\|oTs\|oGp\|oAs\|dTs\|dTs\|dAs\|dTs\|dTs\|dTs\|5mCs\|dTs\|dGs\|5mCs\|dTs\|dGs\|oTs\|oGs\|oTs\|o5mCs\|oA] |
| 5138 | [oTs\|o5mCs\|oTp\|oGp\|oAs\|dTs\|dTs\|dAs\|dTs\|dTs\|dTs\|5mCs\|dTs\|dGs\|5mCs\|dTs\|dGs\|oTs\|oGs\|oTs\|o5mCs\|oA] |
| 5139 | [oTs\|o5mCs\|oTs\|oGs\|oAs\|dTs\|dTs\|dAs\|dTs\|dTs\|dTs\|5mCs\|dTs\|dGs\|5mCs\|dTs\|dGp\|oTs\|oGs\|oTs\|o5mCs\|oA] |
| 5140 | [oTs\|o5mCs\|oTs\|oGs\|oAs\|dTs\|dTs\|dAs\|dTs\|dTs\|dTs\|5mCs\|dTs\|dGs\|5mCs\|dTp\|dGs\|oTs\|oGs\|oTs\|o5mCs\|oA] |
| 5141 | [oTs\|o5mCs\|oTs\|oGs\|oAs\|dTs\|dTs\|dAs\|dTs\|dTs\|dTs\|5mCs\|dTs\|dGs\|5mCs\|dTp\|dGp\|oTs\|oGs\|oTs\|o5mCs\|oA] |
| 5142 | [oTs\|o5mCs\|oTp\|oGs\|oAs\|dTs\|dTs\|dAs\|dTs\|dTs\|dTs\|5mCs\|dTs\|dGs\|5mCs\|dTs\|dGp\|oTs\|oGs\|oTs\|o5mCs\|oA] |
| 5143 | [oTs\|o5mCs\|oTp\|oGs\|oAs\|dTs\|dTs\|dAs\|dTs\|dTs\|dTs\|5mCs\|dTs\|dGs\|5mCs\|dTp\|dGs\|oTs\|oGs\|oTs\|o5mCs\|oA] |
| 5144 | [oTs\|o5mCs\|oTs\|oGp\|oAs\|dTs\|dTs\|dAs\|dTs\|dTs\|dTs\|5mCs\|dTs\|dGs\|5mCs\|dTs\|dGp\|oTs\|oGs\|oTs\|o5mCs\|oA] |
| 5145 | [oTs\|o5mCs\|oTs\|oGp\|oAs\|dTs\|dTs\|dAs\|dTs\|dTs\|dTs\|5mCs\|dTs\|dGs\|5mCs\|dTp\|dGs\|oTs\|oGs\|oTs\|o5mCs\|oA] |
| 5146 | [oTs\|o5mCs\|oTp\|oGs\|oAs\|dTs\|dTs\|dAs\|dTs\|dTs\|dTs\|5mCs\|dTs\|dGs\|5mCs\|dTp\|dGp\|oTs\|oGs\|oTs\|o5mCs\|oA] |
| 5147 | [oTs\|o5mCs\|oTs\|oGp\|oAs\|dTs\|dTs\|dAs\|dTs\|dTs\|dTs\|5mCs\|dTs\|dGs\|5mCs\|dTp\|dGp\|oTs\|oGs\|oTs\|o5mCs\|oA] |
| 5148 | [oTs\|o5mCs\|oTp\|oGp\|oAs\|dTs\|dTs\|dAs\|dTs\|dTs\|dTs\|5mCs\|dTs\|dGs\|5mCs\|dTs\|dGp\|oTs\|oGs\|oTs\|o5mCs\|oA] |
| 5149 | [oTs\|o5mCs\|oTp\|oGp\|oAs\|dTs\|dTs\|dAs\|dTs\|dTs\|dTs\|5mCs\|dTs\|dGs\|5mCs\|dTp\|dGs\|oTs\|oGs\|oTs\|o5mCs\|oA] |
| 5150 | [oTs\|o5mCs\|oTp\|oGp\|oAs\|dTs\|dTs\|dAs\|dTs\|dTs\|dTs\|5mCs\|dTs\|dGs\|5mCs\|dTp\|dGp\|oTs\|oGs\|oTs\|o5mCs\|oA] |
| 5152 | [oTs\|oAs\|oAs\|oAs\|oTs\|oAs\|oTs\|oTs\|dGs\|dAs\|dGs\|5mCs\|dTs\|5mCs\|dTs\|5mCs\|dGs\|dGs\|oGs\|o5mC] |
| 5153 | [oAs\|oAs\|oAs\|o5mCs\|oAs\|oGs\|oTs\|o5mCs\|dTs\|dGs\|dTs\|dGs\|dAs\|dGs\|dTs\|dAs\|dGs\|dGs\|oTs\|oA] |
| 5154 | [oTs\|o5mCs\|o5mCs\|oGs\|oGs\|oGs\|oTs\|oTs\|dTs\|5mCs\|dTs\|dAs\|dGs\|5mCs\|dTs\|5mCs\|dTs\|dGs\|oAs\|oA] |
| 5155 | [oAs\|oTs\|o5mCs\|o5mCs\|oGs\|oGs\|oGs\|oTs\|dTs\|dTs\|5mCs\|dTs\|dAs\|dGs\|5mCs\|dTs\|5mCs\|dTs\|oGs\|oA] |
| 5156 | [o5mCs\|oAs\|oTs\|o5mCs\|o5mCs\|oGs\|oGs\|oGs\|dTs\|dTs\|dTs\|5mCs\|dTs\|dAs\|dGs\|5mCs\|dTs\|5mCs\|oTs\|oG] |
| 5157 | [oTs\|oGs\|oGs\|o5mCs\|oAs\|oGs\|o5mCs\|oTs\|dTs\|dGs\|dTs\|dTs\|5mCs\|dAs\|dTs\|dTs\|dGs\|dAs\|oGs\|oT] |
| 5158 | [o5mCs\|oTs\|oTs\|oTs\|oGs\|oGs\|o5mCs\|oAs\|dGs\|5mCs\|dTs\|dTs\|dGs\|dTs\|dTs\|5mCs\|dAs\|dTs\|oTs\|oG] |
| 5159 | [oGs\|oTs\|oAs\|oTs\|oTs\|oTs\|oTs\|oTs\|5mCs\|dGs\|dTs\|dAs\|dTs\|dTs\|dTs\|5mCs\|dTs\|dTs\|oGs\|o5mC] |
| 5160 | [o5mCs\|oTs\|oAs\|oGs\|oGs\|oTs\|oGs\|oAs\|dTs\|dGs\|5mCs\|dAs\|5mCs\|dTs\|dGs\|5mCs\|dTs\|dTs\|oTs\|oA] |
| 5161 | [oGs\|o5mCs\|oTs\|oAs\|oGs\|oGs\|oTs\|oGs\|dAs\|dTs\|dGs\|5mCs\|dAs\|5mCs\|dTs\|dGs\|5mCs\|dTs\|oTs\|oT] |
| 5162 | [o5mCs\|oAs\|oAs\|o5mCs\|oAs\|oGs\|oTs\|oTs\|dGs\|5mCs\|dTs\|dAs\|dGs\|dGs\|dTs\|dGs\|dAs\|dTs\|oGs\|o5mC] |
| 5163 | [oGs\|oTs\|o5mCs\|oAs\|oAs\|o5mCs\|oAs\|oGs\|dTs\|dTs\|dGs\|5mCs\|dTs\|dAs\|dGs\|dGs\|dTs\|dGs\|oAs\|oT] |
| 5164 | [oTs\|oTs\|o5mCs\|oTs\|oTs\|o5mCs\|oTs\|oTs\|dGs\|dTs\|dAs\|5mCs\|dAs\|dGs\|dTs\|dTs\|dGs\|dGs\|oTs\|o5mC] |
| 5165 | [o5mCs\|oTs\|oTs\|oTs\|o5mCs\|oTs\|oTs\|o5mCs\|dTs\|dTs\|dGs\|dTs\|dAs\|5mCs\|dAs\|dGs\|dTs\|dTs\|oGs\|oG] |
| 5166 | [oTs\|oGs\|oAs\|oTs\|o5mCs\|o5mCs\|oTs\|oGs\|dTs\|dTs\|5mCs\|dTs\|5mCs\|5mCs\|5mCs\|dAs\|dGs\|5mCs\|oAs\|oA] |
| 5167 | [oGs\|oAs\|oGs\|o5mCs\|oTs\|o5mCs\|oTs\|oTs\|dTs\|5mCs\|5mCs\|dAs\|5mCs\|5mCs\|5mCs\|dAs\|dTs\|dGs\|oTs\|oT] |
| 5168 | [oGs\|oGs\|oAs\|oGs\|o5mCs\|oTs\|o5mCs\|oTs\|dTs\|dTs\|5mCs\|5mCs\|dAs\|5mCs\|5mCs\|5mCs\|dAs\|dTs\|oGs\|oT] |
| 5169 | [oTs\|oGs\|oGs\|oTs\|oAs\|oAs\|oTs\|o5mCs\|dAs\|dAs\|dTs\|dGs\|5mCs\|dAs\|dAs\|5mCs\|dTs\|dTs\|oGs\|oT] |
| 5170 | [oAs\|oGs\|o5mCs\|o5mCs\|oAs\|oAs\|oTs\|o5mCs\|dTs\|dGs\|dAs\|dGs\|5mCs\|5mCs\|dAs\|dTs\|dGs\|dAs\|oTs\|oG] |
| 5171 | [oGs\|oAs\|oGs\|o5mCs\|o5mCs\|oAs\|oAs\|oTs\|5mCs\|dTs\|dGs\|dAs\|dGs\|5mCs\|5mCs\|dAs\|dTs\|dGs\|oAs\|oT] |
| 5172 | [oTs\|oAs\|oGs\|oGs\|oAs\|oGs\|o5mCs\|o5mCs\|dAs\|dAs\|dTs\|5mCs\|dTs\|dGs\|dAs\|dGs\|5mCs\|5mCs\|oAs\|oT] |
| 5173 | [oGs\|oTs\|o5mCs\|oGs\|o5mCs\|oTs\|oTs\|o5mCs\|dTs\|dTs\|5mCs\|dTs\|dGs\|5mCs\|dAs\|dGs\|dGs\|dAs\|oAs\|o5mC] |
| 5174 | [oTs\|oGs\|oTs\|o5mCs\|oGs\|o5mCs\|oTs\|oTs\|5mCs\|dTs\|dTs\|5mCs\|dTs\|dGs\|5mCs\|dAs\|dGs\|dGs\|oAs\|oA] |
| 5175 | [oTs\|oTs\|oGs\|oTs\|o5mCs\|oGs\|o5mCs\|oTs\|dTs\|5mCs\|dTs\|dTs\|5mCs\|dTs\|dGs\|5mCs\|dAs\|dGs\|oGs\|oA] |
| 5176 | [oTs\|o5mCs\|oTs\|oGs\|oAs\|oTs\|oTs\|oAs\|dTs\|dTs\|dTs\|5mCs\|dTs\|dGs\|5mCs\|dTs\|dGs\|dTs\|oGs\|oT] |

[0325] The mRNA sequence of reference MSH3 mRNA NM_002439.4 (SEQ ID NO: 5151) (https://www.ncbi.nlm.nih.gov/nuccore/NM_002439.4, incorporated herein by reference), is provided below.

| | |
|---|---|
| 1 | ccgcagacgc ctgggaactg cggccgcggg ctcgcgctcc tcgccaggcc ctgccgccgg |
| 61 | gctgccatcc ttgccctgcc atgtctcgcc ggaagcctgc gtcgggcggc ctcgctgcct |
| 121 | ccagctcagc ccctgcgagg caagcggttt tgagccgatt cttccagtct acgggaagcc |
| 181 | tgaaatccac ctcctcctcc acaggtgcag ccgaccaggt ggaccctggc gctgcagcgg |
| 241 | ctgcagcggc cgcagcggcc gcagcgcccc cagcgccccc agctcccgcc ttcccgcccc |
| 301 | agctgccgcc gcacatagct acagaaattg acagaagaaa gaagagacca ttggaaaatg |
| 361 | atgggcctgt taaaaagaaa gtaaagaaag tccaacaaaa ggaaggagga agtgatctgg |
| 421 | gaatgtctgg caactctgag ccaaagaaat gtctgaggac caggaatgtt tcaaagtctc |
| 481 | tggaaaaatt gaaagaattc tgctgcgatt ctgcccttcc tcaaagtaga gtccagacag |
| 541 | aatctctgca ggagagattt gcagttctgc caaaatgtac tgattttgat gatatcagtc |
| 601 | ttctacacgc aaagaatgca gtttcttctg aagattcgaa acgtcaaatt aatcaaaagg |
| 661 | acacaacact ttttgatctc agtcagtttg gatcatcaaa tacaagtcat gaaaatttac |
| 721 | agaaaactgc ttccaaatca gctaacaaac ggtccaaaag catctatacg ccgctagaat |
| 781 | tacaatacat agaaatgaag cagcagcaca aagatgcagt tttgtgtgtg gaatgtggat |
| 841 | ataagtatag attctttggg gaagatgcag agattgcagc ccgagagctc aatatttatt |
| 901 | gccatttaga tcacaacttt atgacagcaa gtatacctac tcacagactg tttgttcatg |
| 961 | tacgccgcct ggtggcaaaa ggatataagg tgggagttgt gaagcaaact gaaactgcag |
| 1021 | cattaaaggc cattggagac aacagaagtt cactcttttc ccggaaattg actgcccttt |
| 1081 | atacaaaatc tacacttatt ggagaagatg tgaatcccct aatcaagctg gatgatgctg |
| 1141 | taaatgttga tgagataatg actgatactt ctaccagcta tcttctgtgc atctctgaaa |
| 1201 | ataaggaaaa tgttagggac aaaaaaaagg gcaacatttt tattggcatt gtgggagtgc |
| 1261 | agcctgccac aggcgaggtt gtgtttgata gtttccagga ctctgcttct cgttcagagc |
| 1321 | tagaaacccg gatgtcaagc ctgcagccag tagagctgct gcttccttcg gccttgtccg |
| 1381 | agcaaacaga ggcgctcatc cacagagcca catctgttag tgtgcaggat gacagaattc |
| 1441 | gagtcgaaag gatggataac atttattttg aatacagcca tgctttccag gcagttacag |
| 1501 | agttttatgc aaaagataca gttgacatca aaggttctca aattatttct ggcattgtta |
| 1561 | acttagagaa gcctgtgatt tgctctttgg ctgccatcat aaaatacctc aaagaattca |
| 1621 | acttggaaaa gatgctctcc aaacctgaga attttaaaca gctatcaagt aaaatggaat |
| 1681 | ttatgacaat taatggaaca acattaagga atctggaaat cctacagaat cagactgata |
| 1741 | tgaaaaccaa aggaagtttg ctgtgggttt tagaccacac taaaacttca tttgggagac |
| 1801 | ggaagttaaa gaagtgggtg acccagccac tccttaaatt aagggaaata aatgcccggc |
| 1861 | ttgatgctgt atcggaagtt ctccattcag aatctagtgt gtttggtcag atagaaaatc |
| 1921 | atctacgtaa attgcccgac atagagaggg gactctgtag catttatcac aaaaaatgtt |
| 1981 | ctacccaaga gttcttcttg attgtcaaaa ctttatatca cctaaagtca gaatttcaag |
| 2041 | caataatacc tgctgttaat tcccacattc agtcagactt gctccggacc gttattttag |
| 2101 | aaattcctga actcctcagt ccagtggagc attacttaaa gatactcaat gaacaagctg |
| 2161 | ccaaagttgg ggataaaact gaattattta aagacctttc tgacttccct ttaataaaaa |
| 2221 | agaggaagga tgaaattcaa ggtgttattg acgagatccg aatgcatttg caagaaatac |
| 2281 | gaaaaatact aaaaaatcct tctgcacaat atgtgacagt atcaggacag gagtttatga |
| 2341 | tagaaataaa gaactctgct gtatcttgta taccaactga ttgggtaaag gttggaagca |
| 2401 | caaaagctgt gagccgcttt cactctcctt ttattgtaga aaattacaga catctgaatc |
| 2461 | agctccggga gcagctagtc cttgactgca gtgctgaatg gcttgatttt ctagagaaat |
| 2521 | tcagtgaaca ttatcactcc ttgtgtaaag cagtgcatca cctagcaact gttgactgca |
| 2581 | ttttctccct ggccaaggtc gctaagcaag gagattactg cagaccaact gtacaagaag |
| 2641 | aaagaaaaat tgtaataaaa aatggaaggc accctgtgat tgatgtgttg ctgggagaac |
| 2701 | aggatcaata tgtcccaaat aatacagatt tatcagagga ctcagagaga gtaatgataa |
| 2761 | ttaccggacc aaacatgggt ggaaagagct cctacataaa acaagttgca ttgattacca |
| 2821 | tcatggctca gattggctcc tatgttcctg cagaagaagc gacaattggg attgtggatg |
| 2881 | gcattttcac aaggatgggt gctgcagaca atatatataa aggacagagt acatttatgg |
| 2941 | aagaactgac tgacacagca gaaataatca gaaaagcaac atcacagtcc ttggttatct |
| 3001 | tggatgaact aggaagaggg acgagcactc atgatggaat tgccattgcc tatgctacac |
| 3061 | ttgagtattt catcagagat gtgaaatcct taaccctgtt tgtcacccat tatccgccag |
| 3121 | tttgtgaact agaaaaaaat tactcacacc aggtggggaa ttaccacatg ggattcttgg |
| 3181 | tcagtgagga tgaaagcaaa ctggatccag gcgcagcaga acaagtccct gattttgtca |
| 3241 | ccttccttta ccaaataact agaggaattg cagcaaggag ttatggatta aatgtggcta |
| 3301 | aactagcaga tgttcctgga gaaattttga agaaagcagc tcacaagtca aaagagctgg |
| 3361 | aaggattaat aaatacgaaa agaaagagac tcaagtattt tgcaaagtta tggacgatgc |
| 3421 | ataatgcaca agacctgcag aagtggacag aggagttcaa catggaagaa acacagactt |
| 3481 | ctcttcttca ttaaaatgaa gactacattt gtgaacaaaa aatggagaat taaaaatacc |
| 3541 | aactgtacaa aataactctc cagtaacagc ctatctttgt gtgacatgtg agcataaaat |
| 3601 | tatgaccatg gtatattcct attggaaaca gagaggtttt tctgaagaca gtctttttca |
| 3661 | agtttctgtc ttcctaactt ttctacgtat aaacactctt gaatagactt ccactttgta |
| 3721 | attagaaaat tttatggaca gtaagtccag taaagcctta agtggcagaa tataattccc |
| 3781 | aagcttttgg agggtgatat aaaaatttac ttgatatttt tatttgtttc agttcagata |
| 3841 | attggcaact gggtgaatct ggcaggaatc tatccattga actaaaataa ttttattatg |
| 3901 | caaccagttt atccaccaag aacataagaa ttttttataa gtagaaagaa ttggccaggc |
| 3961 | atggtggctc atgcctgtaa tcccagcact ttgggaggcc aaggtaggca gatcacctga |
| 4021 | ggtcaggagt tcaagaccag cctggccaac atggcaaaac cccatcttta ctaaaaatat |
| 4081 | aaagtacatc tctactaaaa atacgaaaaa attagctggg catggtggcg cacacctgta |
| 4141 | gtcccagcta ctccggaggc tgaggcagga gaatctcttg aacctgggag gcggaggttg |
| 4201 | caatgagccg agatcacgtc actgcactcc agcttgggca acagagcaag actccatctc |
| 4261 | aaaaaaaaaa aaagaaaaaa gaaaagaaat agaattatca agcttttaaa aactagagca |
| 4321 | cagaaggaat aaggtcatga aatttaaaag gttaaatatt gtcataggat taagcagttt |
| 4381 | aaagattgtt ggatgaaatt atttgtcatt cattcaagta ataaatattt aatgaatact |
| 4441 | tgctataaaa aaaaaaaaaa aaaaaaaaaa aa |

### Other Aspects

[0326] All publications, patents, and patent applications mentioned in this specification are incorporated herein by reference in their entirety to the same extent as if each individual publication, patent, or patent application was specifically and individually indicated to be incorporated by reference in its entirety. Where a term in the present application is found to be defined differently in a document incorporated herein by reference, the definition provided herein is to serve as the definition for the term.

[0327] While the invention has been described in connection with specific aspects thereof, it will be understood that invention is capable of further modifications and this application is intended to cover any variations, uses, or adaptations of the invention following, in general, the principles of the invention and including such departures from the present disclosure that come within known or customary practice within the art to which the invention pertains and can be applied to the essential features hereinbefore set forth, and follows in the scope of the claimed.

The application's sequence listing, which the Patent Office published only in electronic form, follows.

SEQUENCE LISTING (5176 sequences)

SEQ ID NO: 1 - DNA, 20 bp, Artificial Sequence
  Synthetic sequence
taaatattgagctctcgggc

SEQ ID NO: 2 - DNA, 20 bp, Artificial Sequence
  Synthetic sequence
taaatattgagctctcgggc

SEQ ID NO: 3 - DNA, 20 bp, Artificial Sequence
  Synthetic sequence
taaatattgagctctcgggc

SEQ ID NO: 4 - DNA, 20 bp, Artificial Sequence
  Synthetic sequence
taaatattgagctctcgggc

SEQ ID NO: 5 - DNA, 20 bp, Artificial Sequence
  Synthetic sequence
taaatattgagctctcgggc

SEQ ID NO: 6 - DNA, 20 bp, Artificial Sequence
  Synthetic sequence
taaatattgagctctcgggc

SEQ ID NO: 7 - DNA, 20 bp, Artificial Sequence
  Synthetic sequence
taaatattgagctctcgggc

SEQ ID NO: 8 - DNA, 20 bp, Artificial Sequence
  Synthetic sequence
taaatattgagctctcgggc

SEQ ID NO: 9 - DNA, 20 bp, Artificial Sequence
  Synthetic sequence
taaatattgagctctcgggc

SEQ ID NO: 10 - DNA, 20 bp, Artificial Sequence
  Synthetic sequence
taaatattgagctctcgggc

SEQ ID NO: 11 - DNA, 20 bp, Artificial Sequence
  Synthetic sequence
taaatattgagctctcgggc

SEQ ID NO: 12 - DNA, 20 bp, Artificial Sequence
  Synthetic sequence
taaatattgagctctcgggc

SEQ ID NO: 13 - DNA, 20 bp, Artificial Sequence
  Synthetic sequence
taaatattgagctctcgggc

SEQ ID NO: 14 - DNA, 20 bp, Artificial Sequence
  Synthetic sequence
taaatattgagctctcgggc

SEQ ID NO: 15 - DNA, 20 bp, Artificial Sequence
  Synthetic sequence
taaatattgagctctcgggc

SEQ ID NO: 16 - DNA, 20 bp, Artificial Sequence
  Synthetic sequence
taaatattgagctctcgggc

SEQ ID NO: 17 - DNA, 20 bp, Artificial Sequence
  Synthetic sequence
taaatattgagctctcgggc

SEQ ID NO: 18 - DNA, 20 bp, Artificial Sequence
  Synthetic sequence
taaatattgagctctcgggc

SEQ ID NO: 19 - DNA, 20 bp, Artificial Sequence
  Synthetic sequence
taaatattgagctctcgggc

SEQ ID NO: 20 - DNA, 20 bp, Artificial Sequence
  Synthetic sequence
taaatattgagctctcgggc

SEQ ID NO: 21 - DNA, 20 bp, Artificial Sequence
  Synthetic sequence
taaatattgagctctcgggc

SEQ ID NO: 22 - DNA, 20 bp, Artificial Sequence
  Synthetic sequence
taaatattgagctctcgggc

SEQ ID NO: 23 - DNA, 19 bp, Artificial Sequence
  Synthetic sequence
taaatattgagctctcggg

SEQ ID NO: 24 - DNA, 19 bp, Artificial Sequence
  Synthetic sequence
taaatattgagctctcggg

SEQ ID NO: 25 - DNA, 19 bp, Artificial Sequence
  Synthetic sequence
taaatattgagctctcggg

SEQ ID NO: 26 - DNA, 19 bp, Artificial Sequence
  Synthetic sequence
taaatattgagctctcggg

SEQ ID NO: 27 - DNA, 19 bp, Artificial Sequence
  Synthetic sequence
taaatattgagctctcggg

SEQ ID NO: 28 - DNA, 19 bp, Artificial Sequence
  Synthetic sequence
aaatattgagctctcgggc

SEQ ID NO: 29 - DNA, 19 bp, Artificial Sequence
  Synthetic sequence
aaatattgagctctcgggc

SEQ ID NO: 30 - DNA, 19 bp, Artificial Sequence
  Synthetic sequence
aaatattgagctctcgggc

SEQ ID NO: 31 - DNA, 19 bp, Artificial Sequence
  Synthetic sequence
aaatattgagctctcgggc

SEQ ID NO: 32 - DNA, 19 bp, Artificial Sequence
  Synthetic sequence
aaatattgagctctcgggc

SEQ ID NO: 33 - DNA, 20 bp, Artificial Sequence
  Synthetic sequence
taaatattgagctctcgggc

SEQ ID NO: 34 - DNA, 20 bp, Artificial Sequence
  Synthetic sequence
taaatattgagctctcgggc

SEQ ID NO: 35 - DNA, 20 bp, Artificial Sequence
  Synthetic sequence
taaatattgagctctcgggc

SEQ ID NO: 36 - DNA, 20 bp, Artificial Sequence
  Synthetic sequence
taaatattgagctctcgggc

SEQ ID NO: 37 - DNA, 20 bp, Artificial Sequence
  Synthetic sequence
taaatattgagctctcgggc

SEQ ID NO: 38 - DNA, 20 bp, Artificial Sequence
  Synthetic sequence
taaatattgagctctcgggc

SEQ ID NO: 39 - DNA, 20 bp, Artificial Sequence
  Synthetic sequence
taaatattgagctctcgggc

SEQ ID NO: 40 - DNA, 20 bp, Artificial Sequence
  Synthetic sequence
taaatattgagctctcgggc

SEQ ID NO: 41 - DNA, 19 bp, Artificial Sequence
  Synthetic sequence
taaatattgagctctcggg

SEQ ID NO: 42 - DNA, 19 bp, Artificial Sequence
  Synthetic sequence
taaatattgagctctcggg

SEQ ID NO: 43 - DNA, 19 bp, Artificial Sequence
  Synthetic sequence
taaatattgagctctcggg

SEQ ID NO: 44 - DNA, 19 bp, Artificial Sequence
  Synthetic sequence
taaatattgagctctcggg

SEQ ID NO: 45 - DNA, 20 bp, Artificial Sequence
  Synthetic sequence
taaatattgagctctcgggc

SEQ ID NO: 46 - DNA, 20 bp, Artificial Sequence
  Synthetic sequence
taaatattgagctctcgggc

SEQ ID NO: 47 - DNA, 20 bp, Artificial Sequence
  Synthetic sequence
taaatattgagctctcgggc

SEQ ID NO: 48 - DNA, 18 bp, Artificial Sequence
  Synthetic sequence
taaatattgagctctcgg

SEQ ID NO: 49 - DNA, 18 bp, Artificial Sequence
  Synthetic sequence
taaatattgagctctcgg

SEQ ID NO: 50 - DNA, 18 bp, Artificial Sequence
  Synthetic sequence
taaatattgagctctcgg

SEQ ID NO: 51 - DNA, 18 bp, Artificial Sequence
  Synthetic sequence
taaatattgagctctcgg

SEQ ID NO: 52 - DNA, 18 bp, Artificial Sequence
  Synthetic sequence
aatattgagctctcgggc

SEQ ID NO: 53 - DNA, 18 bp, Artificial Sequence
  Synthetic sequence
aatattgagctctcgggc

SEQ ID NO: 54 - DNA, 18 bp, Artificial Sequence
  Synthetic sequence
aatattgagctctcgggc

SEQ ID NO: 55 - DNA, 18 bp, Artificial Sequence
  Synthetic sequence
aatattgagctctcgggc

SEQ ID NO: 56 - DNA, 20 bp, Artificial Sequence
  Synthetic sequence
taaatattgagctctcgggc

SEQ ID NO: 57 - DNA, 20 bp, Artificial Sequence
  Synthetic sequence
taaatattgagctctcgggc

SEQ ID NO: 58 - DNA, 20 bp, Artificial Sequence
  Synthetic sequence
taaatattgagctctcgggc

SEQ ID NO: 59 - DNA, 20 bp, Artificial Sequence
  Synthetic sequence
taaatattgagctctcgggc

SEQ ID NO: 60 - DNA, 20 bp, Artificial Sequence
  Synthetic sequence
taaatattgagctctcgggc

SEQ ID NO: 61 - DNA, 20 bp, Artificial Sequence
  Synthetic sequence
taaatattgagctctcgggc

SEQ ID NO: 62 - DNA, 19 bp, Artificial Sequence
  Synthetic sequence
taaatattgagctctcggg

SEQ ID NO: 63 - DNA, 19 bp, Artificial Sequence
  Synthetic sequence
taaatattgagctctcggg

SEQ ID NO: 64 - DNA, 19 bp, Artificial Sequence
  Synthetic sequence
taaatattgagctctcggg

SEQ ID NO: 65 - DNA, 19 bp, Artificial Sequence
  Synthetic sequence
aaatattgagctctcgggc

SEQ ID NO: 66 - DNA, 19 bp, Artificial Sequence
  Synthetic sequence
aaatattgagctctcgggc

SEQ ID NO: 67 - DNA, 19 bp, Artificial Sequence
  Synthetic sequence
aaatattgagctctcgggc

SEQ ID NO: 68 - DNA, 18 bp, Artificial Sequence
  Synthetic sequence
taaatattgagctctcgg

SEQ ID NO: 69 - DNA, 18 bp, Artificial Sequence
  Synthetic sequence
taaatattgagctctcgg

SEQ ID NO: 70 - DNA, 18 bp, Artificial Sequence
  Synthetic sequence
taaatattgagctctcgg

SEQ ID NO: 71 - DNA, 18 bp, Artificial Sequence
  Synthetic sequence
aatattgagctctcgggc

SEQ ID NO: 72 - DNA, 18 bp, Artificial Sequence
  Synthetic sequence
aatattgagctctcgggc

SEQ ID NO: 73 - DNA, 18 bp, Artificial Sequence
  Synthetic sequence
aatattgagctctcgggc

SEQ ID NO: 74 - DNA, 17 bp, Artificial Sequence
  Synthetic sequence
taaatattgagctctcg

SEQ ID NO: 75 - DNA, 17 bp, Artificial Sequence
  Synthetic sequence
taaatattgagctctcg

SEQ ID NO: 76 - DNA, 17 bp, Artificial Sequence
  Synthetic sequence
taaatattgagctctcg

SEQ ID NO: 77 - DNA, 17 bp, Artificial Sequence
  Synthetic sequence
atattgagctctcgggc

SEQ ID NO: 78 - DNA, 17 bp, Artificial Sequence
  Synthetic sequence
atattgagctctcgggc

SEQ ID NO: 79 - DNA, 17 bp, Artificial Sequence
  Synthetic sequence
atattgagctctcgggc

SEQ ID NO: 80 - DNA, 19 bp, Artificial Sequence
  Synthetic sequence
aaatattgagctctcgggc

SEQ ID NO: 81 - DNA, 19 bp, Artificial Sequence
  Synthetic sequence
aaatattgagctctcgggc

SEQ ID NO: 82 - DNA, 19 bp, Artificial Sequence
  Synthetic sequence
taaatattgagctctcggg

SEQ ID NO: 83 - DNA, 19 bp, Artificial Sequence
  Synthetic sequence
taaatattgagctctcggg

SEQ ID NO: 84 - DNA, 18 bp, Artificial Sequence
  Synthetic sequence
aaatattgagctctcggg

SEQ ID NO: 85 - DNA, 18 bp, Artificial Sequence
  Synthetic sequence
aaatattgagctctcggg

SEQ ID NO: 86 - DNA, 18 bp, Artificial Sequence
  Synthetic sequence
aaatattgagctctcggg

SEQ ID NO: 87 - DNA, 18 bp, Artificial Sequence
  Synthetic sequence
aaatattgagctctcggg

SEQ ID NO: 88 - DNA, 17 bp, Artificial Sequence
  Synthetic sequence
aaatattgagctctcgg

SEQ ID NO: 89 - DNA, 17 bp, Artificial Sequence
  Synthetic sequence
aaatattgagctctcgg

SEQ ID NO: 90 - DNA, 17 bp, Artificial Sequence
  Synthetic sequence
aaatattgagctctcgg

SEQ ID NO: 91 - DNA, 20 bp, Artificial Sequence
  Synthetic sequence
taaatattgagctctcgggc

SEQ ID NO: 92 - DNA, 20 bp, Artificial Sequence
  Synthetic sequence
taaatattgagctctcgggc

SEQ ID NO: 93 - DNA, 20 bp, Artificial Sequence
  Synthetic sequence
taaatattgagctctcgggc

SEQ ID NO: 94 - DNA, 20 bp, Artificial Sequence
  Synthetic sequence
taaatattgagctctcgggc

SEQ ID NO: 95 - DNA, 19 bp, Artificial Sequence
  Synthetic sequence
taaatattgagctctcggg

SEQ ID NO: 96 - DNA, 19 bp, Artificial Sequence
  Synthetic sequence
aaatattgagctctcgggc

SEQ ID NO: 97 - DNA, 20 bp, Artificial Sequence
  Synthetic sequence
taaatattgagctctcgggc

SEQ ID NO: 98 - DNA, 20 bp, Artificial Sequence
  Synthetic sequence
taaatattgagctctcgggc

SEQ ID NO: 99 - DNA, 19 bp, Artificial Sequence
  Synthetic sequence
taaatattgagctctcggg

SEQ ID NO: 100 - DNA, 20 bp, Artificial Sequence
  Synthetic sequence
taaatattgagctctcgggc

SEQ ID NO: 101 - DNA, 18 bp, Artificial Sequence
  Synthetic sequence
taaatattgagctctcgg

SEQ ID NO: 102 - DNA, 18 bp, Artificial Sequence
  Synthetic sequence
aatattgagctctcgggc

SEQ ID NO: 103 - DNA, 20 bp, Artificial Sequence
  Synthetic sequence
taaatattgagctctcgggc

SEQ ID NO: 104 - DNA, 19 bp, Artificial Sequence
  Synthetic sequence
taaatattgagctctcggg

SEQ ID NO: 105 - DNA, 18 bp, Artificial Sequence
  Synthetic sequence
taaatattgagctctcgg

SEQ ID NO: 106 - DNA, 18 bp, Artificial Sequence
  Synthetic sequence
aatattgagctctcgggc

SEQ ID NO: 107 - DNA, 17 bp, Artificial Sequence
  Synthetic sequence
taaatattgagctctcg

SEQ ID NO: 108 - DNA, 17 bp, Artificial Sequence
  Synthetic sequence
atattgagctctcgggc

SEQ ID NO: 109 - DNA, 19 bp, Artificial Sequence
  Synthetic sequence
aaatattgagctctcgggc

SEQ ID NO: 110 - DNA, 18 bp, Artificial Sequence
  Synthetic sequence
aaatattgagctctcggg

SEQ ID NO: 111 - DNA, 17 bp, Artificial Sequence
  Synthetic sequence
aaatattgagctctcgg

SEQ ID NO: 112 - DNA, 20 bp, Artificial Sequence
  Synthetic sequence
taaatattgagctctcgggc

SEQ ID NO: 113 - DNA, 20 bp, Artificial Sequence
  Synthetic sequence
taaatattgagctctcgggc

SEQ ID NO: 114 - DNA, 20 bp, Artificial Sequence
  Synthetic sequence
taaatattgagctctcgggc

SEQ ID NO: 115 - DNA, 20 bp, Artificial Sequence
  Synthetic sequence
taaatattgagctctcgggc

SEQ ID NO: 116 - DNA, 20 bp, Artificial Sequence
  Synthetic sequence
taaatattgagctctcgggc

SEQ ID NO: 117 - DNA, 20 bp, Artificial Sequence
  Synthetic sequence
taaatattgagctctcgggc

SEQ ID NO: 118 - DNA, 20 bp, Artificial Sequence
  Synthetic sequence
taaatattgagctctcgggc

SEQ ID NO: 119 - DNA, 20 bp, Artificial Sequence
  Synthetic sequence
taaatattgagctctcgggc

SEQ ID NO: 120 - DNA, 20 bp, Artificial Sequence
  Synthetic sequence
taaatattgagctctcgggc

SEQ ID NO: 121 - DNA, 20 bp, Artificial Sequence
  Synthetic sequence
taaatattgagctctcgggc

SEQ ID NO: 122 - DNA, 20 bp, Artificial Sequence
  Synthetic sequence
taaatattgagctctcgggc

SEQ ID NO: 123 - DNA, 20 bp, Artificial Sequence
  Synthetic sequence
taaatattgagctctcgggc

SEQ ID NO: 124 - DNA, 20 bp, Artificial Sequence
  Synthetic sequence
taaatattgagctctcgggc

SEQ ID NO: 125 - DNA, 20 bp, Artificial Sequence
  Synthetic sequence
taaatattgagctctcgggc

SEQ ID NO: 126 - DNA, 20 bp, Artificial Sequence
  Synthetic sequence
taaatattgagctctcgggc

SEQ ID NO: 127 - DNA, 21 bp, Artificial Sequence
  Synthetic sequence
taaatattgagctctcgggct

SEQ ID NO: 128 - DNA, 21 bp, Artificial Sequence
  Synthetic sequence
taaatattgagctctcgggct

SEQ ID NO: 129 - DNA, 21 bp, Artificial Sequence
  Synthetic sequence
taaatattgagctctcgggct

SEQ ID NO: 130 - DNA, 21 bp, Artificial Sequence
  Synthetic sequence
taaatattgagctctcgggct

SEQ ID NO: 131 - DNA, 21 bp, Artificial Sequence
  Synthetic sequence
taaatattgagctctcgggct

SEQ ID NO: 132 - DNA, 21 bp, Artificial Sequence
  Synthetic sequence
taaatattgagctctcgggct

SEQ ID NO: 133 - DNA, 21 bp, Artificial Sequence
  Synthetic sequence
taaatattgagctctcgggct

SEQ ID NO: 134 - DNA, 21 bp, Artificial Sequence
  Synthetic sequence
taaatattgagctctcgggct

SEQ ID NO: 135 - DNA, 21 bp, Artificial Sequence
  Synthetic sequence
taaatattgagctctcgggct

SEQ ID NO: 136 - DNA, 21 bp, Artificial Sequence
  Synthetic sequence
taaatattgagctctcgggct

SEQ ID NO: 137 - DNA, 21 bp, Artificial Sequence
  Synthetic sequence
taaatattgagctctcgggct

SEQ ID NO: 138 - DNA, 21 bp, Artificial Sequence
  Synthetic sequence
taaatattgagctctcgggct

SEQ ID NO: 139 - DNA, 21 bp, Artificial Sequence
  Synthetic sequence
taaatattgagctctcgggct

SEQ ID NO: 140 - DNA, 21 bp, Artificial Sequence
  Synthetic sequence
taaatattgagctctcgggct

SEQ ID NO: 141 - DNA, 21 bp, Artificial Sequence
  Synthetic sequence
taaatattgagctctcgggct

SEQ ID NO: 142 - DNA, 21 bp, Artificial Sequence
  Synthetic sequence
taaatattgagctctcgggct

SEQ ID NO: 143 - DNA, 22 bp, Artificial Sequence
  Synthetic sequence
taaatattgagctctcgggctg

SEQ ID NO: 144 - DNA, 22 bp, Artificial Sequence
  Synthetic sequence
taaatattgagctctcgggctg

SEQ ID NO: 145 - DNA, 22 bp, Artificial Sequence
  Synthetic sequence
taaatattgagctctcgggctg

SEQ ID NO: 146 - DNA, 22 bp, Artificial Sequence
  Synthetic sequence
taaatattgagctctcgggctg

SEQ ID NO: 147 - DNA, 22 bp, Artificial Sequence
  Synthetic sequence
taaatattgagctctcgggctg

SEQ ID NO: 148 - DNA, 22 bp, Artificial Sequence
  Synthetic sequence
taaatattgagctctcgggctg

SEQ ID NO: 149 - DNA, 22 bp, Artificial Sequence
  Synthetic sequence
taaatattgagctctcgggctg

SEQ ID NO: 150 - DNA, 22 bp, Artificial Sequence
  Synthetic sequence
taaatattgagctctcgggctg

SEQ ID NO: 151 - DNA, 22 bp, Artificial Sequence
  Synthetic sequence
taaatattgagctctcgggctg

SEQ ID NO: 152 - DNA, 22 bp, Artificial Sequence
  Synthetic sequence
taaatattgagctctcgggctg

SEQ ID NO: 153 - DNA, 22 bp, Artificial Sequence
  Synthetic sequence
taaatattgagctctcgggctg

SEQ ID NO: 154 - DNA, 22 bp, Artificial Sequence
  Synthetic sequence
taaatattgagctctcgggctg

SEQ ID NO: 155 - DNA, 22 bp, Artificial Sequence
  Synthetic sequence
taaatattgagctctcgggctg

SEQ ID NO: 156 - DNA, 22 bp, Artificial Sequence
  Synthetic sequence
taaatattgagctctcgggctg

SEQ ID NO: 157 - DNA, 22 bp, Artificial Sequence
  Synthetic sequence
taaatattgagctctcgggctg

SEQ ID NO: 158 - DNA, 22 bp, Artificial Sequence
  Synthetic sequence
taaatattgagctctcgggctg

SEQ ID NO: 159 - DNA, 23 bp, Artificial Sequence
  Synthetic sequence
taaatattgagctctcgggctgc

SEQ ID NO: 160 - DNA, 23 bp, Artificial Sequence
  Synthetic sequence
taaatattgagctctcgggctgc

SEQ ID NO: 161 - DNA, 23 bp, Artificial Sequence
  Synthetic sequence
taaatattgagctctcgggctgc

SEQ ID NO: 162 - DNA, 23 bp, Artificial Sequence
  Synthetic sequence
taaatattgagctctcgggctgc

SEQ ID NO: 163 - DNA, 23 bp, Artificial Sequence
  Synthetic sequence
taaatattgagctctcgggctgc

SEQ ID NO: 164 - DNA, 23 bp, Artificial Sequence
  Synthetic sequence
taaatattgagctctcgggctgc

SEQ ID NO: 165 - DNA, 23 bp, Artificial Sequence
  Synthetic sequence
taaatattgagctctcgggctgc

SEQ ID NO: 166 - DNA, 23 bp, Artificial Sequence
  Synthetic sequence
taaatattgagctctcgggctgc

SEQ ID NO: 167 - DNA, 23 bp, Artificial Sequence
  Synthetic sequence
taaatattgagctctcgggctgc

SEQ ID NO: 168 - DNA, 23 bp, Artificial Sequence
  Synthetic sequence
taaatattgagctctcgggctgc

SEQ ID NO: 169 - DNA, 23 bp, Artificial Sequence
  Synthetic sequence
taaatattgagctctcgggctgc

SEQ ID NO: 170 - DNA, 23 bp, Artificial Sequence
  Synthetic sequence
taaatattgagctctcgggctgc

SEQ ID NO: 171 - DNA, 23 bp, Artificial Sequence
  Synthetic sequence
taaatattgagctctcgggctgc

SEQ ID NO: 172 - DNA, 23 bp, Artificial Sequence
  Synthetic sequence
taaatattgagctctcgggctgc

SEQ ID NO: 173 - DNA, 23 bp, Artificial Sequence
  Synthetic sequence
taaatattgagctctcgggctgc

SEQ ID NO: 174 - DNA, 23 bp, Artificial Sequence
  Synthetic sequence
taaatattgagctctcgggctgc

SEQ ID NO: 175 - DNA, 21 bp, Artificial Sequence
  Synthetic sequence
taaatattgagctctcgggct

SEQ ID NO: 176 - DNA, 21 bp, Artificial Sequence
  Synthetic sequence
taaatattgagctctcgggct

SEQ ID NO: 177 - DNA, 21 bp, Artificial Sequence
  Synthetic sequence
taaatattgagctctcgggct

SEQ ID NO: 178 - DNA, 21 bp, Artificial Sequence
  Synthetic sequence
taaatattgagctctcgggct

SEQ ID NO: 179 - DNA, 21 bp, Artificial Sequence
  Synthetic sequence
taaatattgagctctcgggct

SEQ ID NO: 180 - DNA, 21 bp, Artificial Sequence
  Synthetic sequence
taaatattgagctctcgggct

SEQ ID NO: 181 - DNA, 21 bp, Artificial Sequence
  Synthetic sequence
taaatattgagctctcgggct

SEQ ID NO: 182 - DNA, 21 bp, Artificial Sequence
  Synthetic sequence
taaatattgagctctcgggct

SEQ ID NO: 183 - DNA, 21 bp, Artificial Sequence
  Synthetic sequence
taaatattgagctctcgggct

SEQ ID NO: 184 - DNA, 21 bp, Artificial Sequence
  Synthetic sequence
taaatattgagctctcgggct

SEQ ID NO: 185 - DNA, 21 bp, Artificial Sequence
  Synthetic sequence
taaatattgagctctcgggct

SEQ ID NO: 186 - DNA, 21 bp, Artificial Sequence
  Synthetic sequence
taaatattgagctctcgggct

SEQ ID NO: 187 - DNA, 21 bp, Artificial Sequence
  Synthetic sequence
taaatattgagctctcgggct

SEQ ID NO: 188 - DNA, 21 bp, Artificial Sequence
  Synthetic sequence
taaatattgagctctcgggct

SEQ ID NO: 189 - DNA, 21 bp, Artificial Sequence
  Synthetic sequence
taaatattgagctctcgggct

SEQ ID NO: 190 - DNA, 21 bp, Artificial Sequence
  Synthetic sequence
taaatattgagctctcgggct

SEQ ID NO: 191 - DNA, 22 bp, Artificial Sequence
  Synthetic sequence
taaatattgagctctcgggctg

SEQ ID NO: 192 - DNA, 22 bp, Artificial Sequence
  Synthetic sequence
taaatattgagctctcgggctg

SEQ ID NO: 193 - DNA, 22 bp, Artificial Sequence
  Synthetic sequence
taaatattgagctctcgggctg

SEQ ID NO: 194 - DNA, 22 bp, Artificial Sequence
  Synthetic sequence
taaatattgagctctcgggctg

SEQ ID NO: 195 - DNA, 22 bp, Artificial Sequence
  Synthetic sequence
taaatattgagctctcgggctg

SEQ ID NO: 196 - DNA, 22 bp, Artificial Sequence
  Synthetic sequence
taaatattgagctctcgggctg

SEQ ID NO: 197 - DNA, 22 bp, Artificial Sequence
  Synthetic sequence
taaatattgagctctcgggctg

SEQ ID NO: 198 - DNA, 22 bp, Artificial Sequence
  Synthetic sequence
taaatattgagctctcgggctg

SEQ ID NO: 199 - DNA, 22 bp, Artificial Sequence
  Synthetic sequence
taaatattgagctctcgggctg

SEQ ID NO: 200 - DNA, 22 bp, Artificial Sequence
  Synthetic sequence
taaatattgagctctcgggctg

SEQ ID NO: 201 - DNA, 22 bp, Artificial Sequence
  Synthetic sequence
taaatattgagctctcgggctg

SEQ ID NO: 202 - DNA, 22 bp, Artificial Sequence
  Synthetic sequence
taaatattgagctctcgggctg

SEQ ID NO: 203 - DNA, 22 bp, Artificial Sequence
  Synthetic sequence
taaatattgagctctcgggctg

SEQ ID NO: 204 - DNA, 22 bp, Artificial Sequence
  Synthetic sequence
taaatattgagctctcgggctg

SEQ ID NO: 205 - DNA, 22 bp, Artificial Sequence
  Synthetic sequence
taaatattgagctctcgggctg

SEQ ID NO: 206 - DNA, 22 bp, Artificial Sequence
  Synthetic sequence
taaatattgagctctcgggctg

SEQ ID NO: 207 - DNA, 20 bp, Artificial Sequence
  Synthetic sequence
aaacagtctgtgagtaggta

SEQ ID NO: 208 - DNA, 20 bp, Artificial Sequence
  Synthetic sequence
aaacagtctgtgagtaggta

SEQ ID NO: 209 - DNA, 20 bp, Artificial Sequence
  Synthetic sequence
aaacagtctgtgagtaggta

SEQ ID NO: 210 - DNA, 20 bp, Artificial Sequence
  Synthetic sequence
aaacagtctgtgagtaggta

SEQ ID NO: 211 - DNA, 20 bp, Artificial Sequence
  Synthetic sequence
aaacagtctgtgagtaggta

SEQ ID NO: 212 - DNA, 20 bp, Artificial Sequence
  Synthetic sequence
aaacagtctgtgagtaggta

SEQ ID NO: 213 - DNA, 20 bp, Artificial Sequence
  Synthetic sequence
aaacagtctgtgagtaggta

SEQ ID NO: 214 - DNA, 20 bp, Artificial Sequence
  Synthetic sequence
aaacagtctgtgagtaggta

SEQ ID NO: 215 - DNA, 20 bp, Artificial Sequence
  Synthetic sequence
aaacagtctgtgagtaggta

SEQ ID NO: 216 - DNA, 20 bp, Artificial Sequence
  Synthetic sequence
aaacagtctgtgagtaggta

SEQ ID NO: 217 - DNA, 20 bp, Artificial Sequence
  Synthetic sequence
aaacagtctgtgagtaggta

SEQ ID NO: 218 - DNA, 20 bp, Artificial Sequence
  Synthetic sequence
aaacagtctgtgagtaggta

SEQ ID NO: 219 - DNA, 20 bp, Artificial Sequence
  Synthetic sequence
aaacagtctgtgagtaggta

SEQ ID NO: 220 - DNA, 20 bp, Artificial Sequence
  Synthetic sequence
aaacagtctgtgagtaggta

SEQ ID NO: 221 - DNA, 20 bp, Artificial Sequence
  Synthetic sequence
aaacagtctgtgagtaggta

SEQ ID NO: 222 - DNA, 20 bp, Artificial Sequence
  Synthetic sequence
aaacagtctgtgagtaggta

SEQ ID NO: 223 - DNA, 20 bp, Artificial Sequence
  Synthetic sequence
aaacagtctgtgagtaggta

SEQ ID NO: 224 - DNA, 20 bp, Artificial Sequence
  Synthetic sequence
aaacagtctgtgagtaggta

SEQ ID NO: 225 - DNA, 20 bp, Artificial Sequence
  Synthetic sequence
aaacagtctgtgagtaggta

SEQ ID NO: 226 - DNA, 20 bp, Artificial Sequence
  Synthetic sequence
aaacagtctgtgagtaggta

SEQ ID NO: 227 - DNA, 20 bp, Artificial Sequence
  Synthetic sequence
aaacagtctgtgagtaggta

SEQ ID NO: 228 - DNA, 20 bp, Artificial Sequence
  Synthetic sequence
aaacagtctgtgagtaggta

SEQ ID NO: 229 - DNA, 19 bp, Artificial Sequence
  Synthetic sequence
aaacagtctgtgagtaggt

SEQ ID NO: 230 - DNA, 19 bp, Artificial Sequence
  Synthetic sequence
aaacagtctgtgagtaggt

SEQ ID NO: 231 - DNA, 19 bp, Artificial Sequence
  Synthetic sequence
aaacagtctgtgagtaggt

SEQ ID NO: 232 - DNA, 19 bp, Artificial Sequence
  Synthetic sequence
aaacagtctgtgagtaggt

SEQ ID NO: 233 - DNA, 19 bp, Artificial Sequence
  Synthetic sequence
aaacagtctgtgagtaggt

SEQ ID NO: 234 - DNA, 19 bp, Artificial Sequence
  Synthetic sequence
aacagtctgtgagtaggta

SEQ ID NO: 235 - DNA, 19 bp, Artificial Sequence
  Synthetic sequence
aacagtctgtgagtaggta

SEQ ID NO: 236 - DNA, 19 bp, Artificial Sequence
  Synthetic sequence
aacagtctgtgagtaggta

SEQ ID NO: 237 - DNA, 19 bp, Artificial Sequence
  Synthetic sequence
aacagtctgtgagtaggta

SEQ ID NO: 238 - DNA, 19 bp, Artificial Sequence
  Synthetic sequence
aacagtctgtgagtaggta

SEQ ID NO: 239 - DNA, 20 bp, Artificial Sequence
  Synthetic sequence
aaacagtctgtgagtaggta

SEQ ID NO: 240 - DNA, 20 bp, Artificial Sequence
  Synthetic sequence
aaacagtctgtgagtaggta

SEQ ID NO: 241 - DNA, 20 bp, Artificial Sequence
  Synthetic sequence
aaacagtctgtgagtaggta

SEQ ID NO: 242 - DNA, 20 bp, Artificial Sequence
  Synthetic sequence
aaacagtctgtgagtaggta

SEQ ID NO: 243 - DNA, 20 bp, Artificial Sequence
  Synthetic sequence
aaacagtctgtgagtaggta

SEQ ID NO: 244 - DNA, 20 bp, Artificial Sequence
  Synthetic sequence
aaacagtctgtgagtaggta

SEQ ID NO: 245 - DNA, 20 bp, Artificial Sequence
  Synthetic sequence
aaacagtctgtgagtaggta

SEQ ID NO: 246 - DNA, 20 bp, Artificial Sequence
  Synthetic sequence
aaacagtctgtgagtaggta

SEQ ID NO: 247 - DNA, 19 bp, Artificial Sequence
  Synthetic sequence
aaacagtctgtgagtaggt

SEQ ID NO: 248 - DNA, 19 bp, Artificial Sequence
  Synthetic sequence
aaacagtctgtgagtaggt

SEQ ID NO: 249 - DNA, 19 bp, Artificial Sequence
  Synthetic sequence
aaacagtctgtgagtaggt

SEQ ID NO: 250 - DNA, 19 bp, Artificial Sequence
  Synthetic sequence
aaacagtctgtgagtaggt

SEQ ID NO: 251 - DNA, 20 bp, Artificial Sequence
  Synthetic sequence
aaacagtctgtgagtaggta

SEQ ID NO: 252 - DNA, 20 bp, Artificial Sequence
  Synthetic sequence
aaacagtctgtgagtaggta

SEQ ID NO: 253 - DNA, 20 bp, Artificial Sequence
  Synthetic sequence
aaacagtctgtgagtaggta

SEQ ID NO: 254 - DNA, 18 bp, Artificial Sequence
  Synthetic sequence
aaacagtctgtgagtagg

SEQ ID NO: 255 - DNA, 18 bp, Artificial Sequence
  Synthetic sequence
aaacagtctgtgagtagg

SEQ ID NO: 256 - DNA, 18 bp, Artificial Sequence
  Synthetic sequence
aaacagtctgtgagtagg

SEQ ID NO: 257 - DNA, 18 bp, Artificial Sequence
  Synthetic sequence
aaacagtctgtgagtagg

SEQ ID NO: 258 - DNA, 18 bp, Artificial Sequence
  Synthetic sequence
acagtctgtgagtaggta

SEQ ID NO: 259 - DNA, 18 bp, Artificial Sequence
  Synthetic sequence
acagtctgtgagtaggta

SEQ ID NO: 260 - DNA, 18 bp, Artificial Sequence
  Synthetic sequence
acagtctgtgagtaggta

SEQ ID NO: 261 - DNA, 18 bp, Artificial Sequence
  Synthetic sequence
acagtctgtgagtaggta

SEQ ID NO: 262 - DNA, 20 bp, Artificial Sequence
  Synthetic sequence
aaacagtctgtgagtaggta

SEQ ID NO: 263 - DNA, 20 bp, Artificial Sequence
  Synthetic sequence
aaacagtctgtgagtaggta

SEQ ID NO: 264 - DNA, 20 bp, Artificial Sequence
  Synthetic sequence
aaacagtctgtgagtaggta

SEQ ID NO: 265 - DNA, 20 bp, Artificial Sequence
  Synthetic sequence
aaacagtctgtgagtaggta

SEQ ID NO: 266 - DNA, 20 bp, Artificial Sequence
  Synthetic sequence
aaacagtctgtgagtaggta

SEQ ID NO: 267 - DNA, 20 bp, Artificial Sequence
  Synthetic sequence
aaacagtctgtgagtaggta

SEQ ID NO: 268 - DNA, 19 bp, Artificial Sequence
  Synthetic sequence
aaacagtctgtgagtaggt

SEQ ID NO: 269 - DNA, 19 bp, Artificial Sequence
  Synthetic sequence
aaacagtctgtgagtaggt

SEQ ID NO: 270 - DNA, 19 bp, Artificial Sequence
  Synthetic sequence
aaacagtctgtgagtaggt

SEQ ID NO: 271 - DNA, 19 bp, Artificial Sequence
  Synthetic sequence
aacagtctgtgagtaggta

SEQ ID NO: 272 - DNA, 19 bp, Artificial Sequence
  Synthetic sequence
aacagtctgtgagtaggta

SEQ ID NO: 273 - DNA, 19 bp, Artificial Sequence
  Synthetic sequence
aacagtctgtgagtaggta

SEQ ID NO: 274 - DNA, 18 bp, Artificial Sequence
  Synthetic sequence
aaacagtctgtgagtagg

SEQ ID NO: 275 - DNA, 18 bp, Artificial Sequence
  Synthetic sequence
aaacagtctgtgagtagg

SEQ ID NO: 276 - DNA, 18 bp, Artificial Sequence
  Synthetic sequence
aaacagtctgtgagtagg

SEQ ID NO: 277 - DNA, 18 bp, Artificial Sequence
  Synthetic sequence
acagtctgtgagtaggta

SEQ ID NO: 278 - DNA, 18 bp, Artificial Sequence
  Synthetic sequence
acagtctgtgagtaggta

SEQ ID NO: 279 - DNA, 18 bp, Artificial Sequence
  Synthetic sequence
acagtctgtgagtaggta

SEQ ID NO: 280 - DNA, 17 bp, Artificial Sequence
  Synthetic sequence
aaacagtctgtgagtag

SEQ ID NO: 281 - DNA, 17 bp, Artificial Sequence
  Synthetic sequence
aaacagtctgtgagtag

SEQ ID NO: 282 - DNA, 17 bp, Artificial Sequence
  Synthetic sequence
aaacagtctgtgagtag

SEQ ID NO: 283 - DNA, 17 bp, Artificial Sequence
  Synthetic sequence
cagtctgtgagtaggta

SEQ ID NO: 284 - DNA, 17 bp, Artificial Sequence
  Synthetic sequence
cagtctgtgagtaggta

SEQ ID NO: 285 - DNA, 17 bp, Artificial Sequence
  Synthetic sequence
cagtctgtgagtaggta

SEQ ID NO: 286 - DNA, 19 bp, Artificial Sequence
  Synthetic sequence
aacagtctgtgagtaggta

SEQ ID NO: 287 - DNA, 19 bp, Artificial Sequence
  Synthetic sequence
aacagtctgtgagtaggta

SEQ ID NO: 288 - DNA, 19 bp, Artificial Sequence
  Synthetic sequence
aaacagtctgtgagtaggt

SEQ ID NO: 289 - DNA, 19 bp, Artificial Sequence
  Synthetic sequence
aaacagtctgtgagtaggt

SEQ ID NO: 290 - DNA, 18 bp, Artificial Sequence
  Synthetic sequence
aacagtctgtgagtaggt

SEQ ID NO: 291 - DNA, 18 bp, Artificial Sequence
  Synthetic sequence
aacagtctgtgagtaggt

SEQ ID NO: 292 - DNA, 18 bp, Artificial Sequence
  Synthetic sequence
aacagtctgtgagtaggt

SEQ ID NO: 293 - DNA, 18 bp, Artificial Sequence
  Synthetic sequence
aacagtctgtgagtaggt

SEQ ID NO: 294 - DNA, 17 bp, Artificial Sequence
  Synthetic sequence
aacagtctgtgagtagg

SEQ ID NO: 295 - DNA, 17 bp, Artificial Sequence
  Synthetic sequence
aacagtctgtgagtagg

SEQ ID NO: 296 - DNA, 17 bp, Artificial Sequence
  Synthetic sequence
aacagtctgtgagtagg

SEQ ID NO: 297 - DNA, 20 bp, Artificial Sequence
  Synthetic sequence
aaacagtctgtgagtaggta

SEQ ID NO: 298 - DNA, 20 bp, Artificial Sequence
  Synthetic sequence
aaacagtctgtgagtaggta

SEQ ID NO: 299 - DNA, 20 bp, Artificial Sequence
  Synthetic sequence
aaacagtctgtgagtaggta

SEQ ID NO: 300 - DNA, 20 bp, Artificial Sequence
  Synthetic sequence
aaacagtctgtgagtaggta

SEQ ID NO: 301 - DNA, 19 bp, Artificial Sequence
  Synthetic sequence
aaacagtctgtgagtaggt

SEQ ID NO: 302 - DNA, 19 bp, Artificial Sequence
  Synthetic sequence
aacagtctgtgagtaggta

SEQ ID NO: 303 - DNA, 20 bp, Artificial Sequence
  Synthetic sequence
aaacagtctgtgagtaggta

SEQ ID NO: 304 - DNA, 20 bp, Artificial Sequence
  Synthetic sequence
aaacagtctgtgagtaggta

SEQ ID NO: 305 - DNA, 19 bp, Artificial Sequence
  Synthetic sequence
aaacagtctgtgagtaggt

SEQ ID NO: 306 - DNA, 20 bp, Artificial Sequence
  Synthetic sequence
aaacagtctgtgagtaggta

SEQ ID NO: 307 - DNA, 18 bp, Artificial Sequence
  Synthetic sequence
aaacagtctgtgagtagg

SEQ ID NO: 308 - DNA, 18 bp, Artificial Sequence
  Synthetic sequence
acagtctgtgagtaggta

SEQ ID NO: 309 - DNA, 20 bp, Artificial Sequence
  Synthetic sequence
aaacagtctgtgagtaggta

SEQ ID NO: 310 - DNA, 19 bp, Artificial Sequence
  Synthetic sequence
aaacagtctgtgagtaggt

SEQ ID NO: 311 - DNA, 18 bp, Artificial Sequence
  Synthetic sequence
aaacagtctgtgagtagg

SEQ ID NO: 312 - DNA, 18 bp, Artificial Sequence
  Synthetic sequence
acagtctgtgagtaggta

SEQ ID NO: 313 - DNA, 17 bp, Artificial Sequence
  Synthetic sequence
aaacagtctgtgagtag

SEQ ID NO: 314 - DNA, 17 bp, Artificial Sequence
  Synthetic sequence
cagtctgtgagtaggta

SEQ ID NO: 315 - DNA, 19 bp, Artificial Sequence
  Synthetic sequence
aacagtctgtgagtaggta

SEQ ID NO: 316 - DNA, 18 bp, Artificial Sequence
  Synthetic sequence
aacagtctgtgagtaggt

SEQ ID NO: 317 - DNA, 17 bp, Artificial Sequence
  Synthetic sequence
aacagtctgtgagtagg

SEQ ID NO: 318 - DNA, 20 bp, Artificial Sequence
  Synthetic sequence
aaacagtctgtgagtaggta

SEQ ID NO: 319 - DNA, 20 bp, Artificial Sequence
  Synthetic sequence
aaacagtctgtgagtaggta

SEQ ID NO: 320 - DNA, 20 bp, Artificial Sequence
  Synthetic sequence
aaacagtctgtgagtaggta

SEQ ID NO: 321 - DNA, 20 bp, Artificial Sequence
  Synthetic sequence
aaacagtctgtgagtaggta

SEQ ID NO: 322 - DNA, 20 bp, Artificial Sequence
  Synthetic sequence
aaacagtctgtgagtaggta

SEQ ID NO: 323 - DNA, 20 bp, Artificial Sequence
  Synthetic sequence
aaacagtctgtgagtaggta

SEQ ID NO: 324 - DNA, 20 bp, Artificial Sequence
  Synthetic sequence
aaacagtctgtgagtaggta

SEQ ID NO: 325 - DNA, 20 bp, Artificial Sequence
  Synthetic sequence
aaacagtctgtgagtaggta

SEQ ID NO: 326 - DNA, 20 bp, Artificial Sequence
  Synthetic sequence
aaacagtctgtgagtaggta

SEQ ID NO: 327 - DNA, 20 bp, Artificial Sequence
  Synthetic sequence
aaacagtctgtgagtaggta

SEQ ID NO: 328 - DNA, 20 bp, Artificial Sequence
  Synthetic sequence
aaacagtctgtgagtaggta

SEQ ID NO: 329 - DNA, 20 bp, Artificial Sequence
  Synthetic sequence
aaacagtctgtgagtaggta

SEQ ID NO: 330 - DNA, 20 bp, Artificial Sequence
  Synthetic sequence
aaacagtctgtgagtaggta

SEQ ID NO: 331 - DNA, 20 bp, Artificial Sequence
  Synthetic sequence
aaacagtctgtgagtaggta

SEQ ID NO: 332 - DNA, 20 bp, Artificial Sequence
  Synthetic sequence
aaacagtctgtgagtaggta

SEQ ID NO: 333 - DNA, 21 bp, Artificial Sequence
  Synthetic sequence
aaacagtctgtgagtaggtat

SEQ ID NO: 334 - DNA, 21 bp, Artificial Sequence
  Synthetic sequence
aaacagtctgtgagtaggtat

SEQ ID NO: 335 - DNA, 21 bp, Artificial Sequence
  Synthetic sequence
aaacagtctgtgagtaggtat

SEQ ID NO: 336 - DNA, 21 bp, Artificial Sequence
  Synthetic sequence
aaacagtctgtgagtaggtat

SEQ ID NO: 337 - DNA, 21 bp, Artificial Sequence
  Synthetic sequence
aaacagtctgtgagtaggtat

SEQ ID NO: 338 - DNA, 21 bp, Artificial Sequence
  Synthetic sequence
aaacagtctgtgagtaggtat

SEQ ID NO: 339 - DNA, 21 bp, Artificial Sequence
  Synthetic sequence
aaacagtctgtgagtaggtat

SEQ ID NO: 340 - DNA, 21 bp, Artificial Sequence
  Synthetic sequence
aaacagtctgtgagtaggtat

SEQ ID NO: 341 - DNA, 21 bp, Artificial Sequence
  Synthetic sequence
aaacagtctgtgagtaggtat

SEQ ID NO: 342 - DNA, 21 bp, Artificial Sequence
  Synthetic sequence
aaacagtctgtgagtaggtat

SEQ ID NO: 343 - DNA, 21 bp, Artificial Sequence
  Synthetic sequence
aaacagtctgtgagtaggtat

SEQ ID NO: 344 - DNA, 21 bp, Artificial Sequence
  Synthetic sequence
aaacagtctgtgagtaggtat

SEQ ID NO: 345 - DNA, 21 bp, Artificial Sequence
  Synthetic sequence
aaacagtctgtgagtaggtat

SEQ ID NO: 346 - DNA, 21 bp, Artificial Sequence
  Synthetic sequence
aaacagtctgtgagtaggtat

SEQ ID NO: 347 - DNA, 21 bp, Artificial Sequence
  Synthetic sequence
aaacagtctgtgagtaggtat

SEQ ID NO: 348 - DNA, 21 bp, Artificial Sequence
  Synthetic sequence
aaacagtctgtgagtaggtat

SEQ ID NO: 349 - DNA, 22 bp, Artificial Sequence
  Synthetic sequence
aaacagtctgtgagtaggtata

SEQ ID NO: 350 - DNA, 22 bp, Artificial Sequence
  Synthetic sequence
aaacagtctgtgagtaggtata

SEQ ID NO: 351 - DNA, 22 bp, Artificial Sequence
  Synthetic sequence
aaacagtctgtgagtaggtata

SEQ ID NO: 352 - DNA, 22 bp, Artificial Sequence
  Synthetic sequence
aaacagtctgtgagtaggtata

SEQ ID NO: 353 - DNA, 22 bp, Artificial Sequence
  Synthetic sequence
aaacagtctgtgagtaggtata

SEQ ID NO: 354 - DNA, 22 bp, Artificial Sequence
  Synthetic sequence
aaacagtctgtgagtaggtata

SEQ ID NO: 355 - DNA, 22 bp, Artificial Sequence
  Synthetic sequence
aaacagtctgtgagtaggtata

SEQ ID NO: 356 - DNA, 22 bp, Artificial Sequence
  Synthetic sequence
aaacagtctgtgagtaggtata

SEQ ID NO: 357 - DNA, 22 bp, Artificial Sequence
  Synthetic sequence
aaacagtctgtgagtaggtata

SEQ ID NO: 358 - DNA, 22 bp, Artificial Sequence
  Synthetic sequence
aaacagtctgtgagtaggtata

SEQ ID NO: 359 - DNA, 22 bp, Artificial Sequence
  Synthetic sequence
aaacagtctgtgagtaggtata

SEQ ID NO: 360 - DNA, 22 bp, Artificial Sequence
  Synthetic sequence
aaacagtctgtgagtaggtata

SEQ ID NO: 361 - DNA, 22 bp, Artificial Sequence
  Synthetic sequence
aaacagtctgtgagtaggtata

SEQ ID NO: 362 - DNA, 22 bp, Artificial Sequence
  Synthetic sequence
aaacagtctgtgagtaggtata

SEQ ID NO: 363 - DNA, 22 bp, Artificial Sequence
  Synthetic sequence
aaacagtctgtgagtaggtata

SEQ ID NO: 364 - DNA, 22 bp, Artificial Sequence
  Synthetic sequence
aaacagtctgtgagtaggtata

SEQ ID NO: 365 - DNA, 23 bp, Artificial Sequence
  Synthetic sequence
aaacagtctgtgagtaggtatac

SEQ ID NO: 366 - DNA, 23 bp, Artificial Sequence
  Synthetic sequence
aaacagtctgtgagtaggtatac

SEQ ID NO: 367 - DNA, 23 bp, Artificial Sequence
  Synthetic sequence
aaacagtctgtgagtaggtatac

SEQ ID NO: 368 - DNA, 23 bp, Artificial Sequence
  Synthetic sequence
aaacagtctgtgagtaggtatac

SEQ ID NO: 369 - DNA, 23 bp, Artificial Sequence
  Synthetic sequence
aaacagtctgtgagtaggtatac

SEQ ID NO: 370 - DNA, 23 bp, Artificial Sequence
  Synthetic sequence
aaacagtctgtgagtaggtatac

SEQ ID NO: 371 - DNA, 23 bp, Artificial Sequence
  Synthetic sequence
aaacagtctgtgagtaggtatac

SEQ ID NO: 372 - DNA, 23 bp, Artificial Sequence
  Synthetic sequence
aaacagtctgtgagtaggtatac

SEQ ID NO: 373 - DNA, 23 bp, Artificial Sequence
  Synthetic sequence
aaacagtctgtgagtaggtatac

SEQ ID NO: 374 - DNA, 23 bp, Artificial Sequence
  Synthetic sequence
aaacagtctgtgagtaggtatac

SEQ ID NO: 375 - DNA, 23 bp, Artificial Sequence
  Synthetic sequence
aaacagtctgtgagtaggtatac

SEQ ID NO: 376 - DNA, 23 bp, Artificial Sequence
  Synthetic sequence
aaacagtctgtgagtaggtatac

SEQ ID NO: 377 - DNA, 23 bp, Artificial Sequence
  Synthetic sequence
aaacagtctgtgagtaggtatac

SEQ ID NO: 378 - DNA, 23 bp, Artificial Sequence
  Synthetic sequence
aaacagtctgtgagtaggtatac

SEQ ID NO: 379 - DNA, 23 bp, Artificial Sequence
  Synthetic sequence
aaacagtctgtgagtaggtatac

SEQ ID NO: 380 - DNA, 23 bp, Artificial Sequence
  Synthetic sequence
aaacagtctgtgagtaggtatac

SEQ ID NO: 381 - DNA, 21 bp, Artificial Sequence
  Synthetic sequence
aaacagtctgtgagtaggtat

SEQ ID NO: 382 - DNA, 21 bp, Artificial Sequence
  Synthetic sequence
aaacagtctgtgagtaggtat

SEQ ID NO: 383 - DNA, 21 bp, Artificial Sequence
  Synthetic sequence
aaacagtctgtgagtaggtat

SEQ ID NO: 384 - DNA, 21 bp, Artificial Sequence
  Synthetic sequence
aaacagtctgtgagtaggtat

SEQ ID NO: 385 - DNA, 21 bp, Artificial Sequence
  Synthetic sequence
aaacagtctgtgagtaggtat

SEQ ID NO: 386 - DNA, 21 bp, Artificial Sequence
  Synthetic sequence
aaacagtctgtgagtaggtat

SEQ ID NO: 387 - DNA, 21 bp, Artificial Sequence
  Synthetic sequence
aaacagtctgtgagtaggtat

SEQ ID NO: 388 - DNA, 21 bp, Artificial Sequence
  Synthetic sequence
aaacagtctgtgagtaggtat

SEQ ID NO: 389 - DNA, 21 bp, Artificial Sequence
  Synthetic sequence
aaacagtctgtgagtaggtat

SEQ ID NO: 390 - DNA, 21 bp, Artificial Sequence
  Synthetic sequence
aaacagtctgtgagtaggtat

SEQ ID NO: 391 - DNA, 21 bp, Artificial Sequence
  Synthetic sequence
aaacagtctgtgagtaggtat

SEQ ID NO: 392 - DNA, 21 bp, Artificial Sequence
  Synthetic sequence
aaacagtctgtgagtaggtat

SEQ ID NO: 393 - DNA, 21 bp, Artificial Sequence
  Synthetic sequence
aaacagtctgtgagtaggtat

SEQ ID NO: 394 - DNA, 21 bp, Artificial Sequence
  Synthetic sequence
aaacagtctgtgagtaggtat

SEQ ID NO: 395 - DNA, 21 bp, Artificial Sequence
  Synthetic sequence
aaacagtctgtgagtaggtat

SEQ ID NO: 396 - DNA, 21 bp, Artificial Sequence
  Synthetic sequence
aaacagtctgtgagtaggtat

SEQ ID NO: 397 - DNA, 22 bp, Artificial Sequence
  Synthetic sequence
aaacagtctgtgagtaggtata

SEQ ID NO: 398 - DNA, 22 bp, Artificial Sequence
  Synthetic sequence
aaacagtctgtgagtaggtata

SEQ ID NO: 399 - DNA, 22 bp, Artificial Sequence
  Synthetic sequence
aaacagtctgtgagtaggtata

SEQ ID NO: 400 - DNA, 22 bp, Artificial Sequence
  Synthetic sequence
aaacagtctgtgagtaggtata

SEQ ID NO: 401 - DNA, 22 bp, Artificial Sequence
  Synthetic sequence
aaacagtctgtgagtaggtata

SEQ ID NO: 402 - DNA, 22 bp, Artificial Sequence
  Synthetic sequence
aaacagtctgtgagtaggtata

SEQ ID NO: 403 - DNA, 22 bp, Artificial Sequence
  Synthetic sequence
aaacagtctgtgagtaggtata

SEQ ID NO: 404 - DNA, 22 bp, Artificial Sequence
  Synthetic sequence
aaacagtctgtgagtaggtata

SEQ ID NO: 405 - DNA, 22 bp, Artificial Sequence
  Synthetic sequence
aaacagtctgtgagtaggtata

SEQ ID NO: 406 - DNA, 22 bp, Artificial Sequence
  Synthetic sequence
aaacagtctgtgagtaggtata

SEQ ID NO: 407 - DNA, 22 bp, Artificial Sequence
  Synthetic sequence
aaacagtctgtgagtaggtata

SEQ ID NO: 408 - DNA, 22 bp, Artificial Sequence
  Synthetic sequence
aaacagtctgtgagtaggtata

SEQ ID NO: 409 - DNA, 22 bp, Artificial Sequence
  Synthetic sequence
aaacagtctgtgagtaggtata

SEQ ID NO: 410 - DNA, 22 bp, Artificial Sequence
  Synthetic sequence
aaacagtctgtgagtaggtata

SEQ ID NO: 411 - DNA, 22 bp, Artificial Sequence
  Synthetic sequence
aaacagtctgtgagtaggtata

SEQ ID NO: 412 - DNA, 22 bp, Artificial Sequence
  Synthetic sequence
aaacagtctgtgagtaggtata

SEQ ID NO: 413 - DNA, 20 bp, Artificial Sequence
  Synthetic sequence
tccgggtttctagctctgaa

SEQ ID NO: 414 - DNA, 20 bp, Artificial Sequence
  Synthetic sequence
tccgggtttctagctctgaa

SEQ ID NO: 415 - DNA, 20 bp, Artificial Sequence
  Synthetic sequence
tccgggtttctagctctgaa

SEQ ID NO: 416 - DNA, 20 bp, Artificial Sequence
  Synthetic sequence
tccgggtttctagctctgaa

SEQ ID NO: 417 - DNA, 20 bp, Artificial Sequence
  Synthetic sequence
tccgggtttctagctctgaa

SEQ ID NO: 418 - DNA, 20 bp, Artificial Sequence
  Synthetic sequence
tccgggtttctagctctgaa

SEQ ID NO: 419 - DNA, 20 bp, Artificial Sequence
  Synthetic sequence
tccgggtttctagctctgaa

SEQ ID NO: 420 - DNA, 20 bp, Artificial Sequence
  Synthetic sequence
tccgggtttctagctctgaa

SEQ ID NO: 421 - DNA, 20 bp, Artificial Sequence
  Synthetic sequence
tccgggtttctagctctgaa

SEQ ID NO: 422 - DNA, 20 bp, Artificial Sequence
  Synthetic sequence
tccgggtttctagctctgaa

SEQ ID NO: 423 - DNA, 20 bp, Artificial Sequence
  Synthetic sequence
tccgggtttctagctctgaa

SEQ ID NO: 424 - DNA, 20 bp, Artificial Sequence
  Synthetic sequence
tccgggtttctagctctgaa

SEQ ID NO: 425 - DNA, 20 bp, Artificial Sequence
  Synthetic sequence
tccgggtttctagctctgaa

SEQ ID NO: 426 - DNA, 20 bp, Artificial Sequence
  Synthetic sequence
tccgggtttctagctctgaa

SEQ ID NO: 427 - DNA, 20 bp, Artificial Sequence
  Synthetic sequence
tccgggtttctagctctgaa

SEQ ID NO: 428 - DNA, 20 bp, Artificial Sequence
  Synthetic sequence
tccgggtttctagctctgaa

SEQ ID NO: 429 - DNA, 20 bp, Artificial Sequence
  Synthetic sequence
tccgggtttctagctctgaa

SEQ ID NO: 430 - DNA, 20 bp, Artificial Sequence
  Synthetic sequence
tccgggtttctagctctgaa

SEQ ID NO: 431 - DNA, 20 bp, Artificial Sequence
  Synthetic sequence
tccgggtttctagctctgaa

SEQ ID NO: 432 - DNA, 20 bp, Artificial Sequence
  Synthetic sequence
tccgggtttctagctctgaa

SEQ ID NO: 433 - DNA, 20 bp, Artificial Sequence
  Synthetic sequence
tccgggtttctagctctgaa

SEQ ID NO: 434 - DNA, 20 bp, Artificial Sequence
  Synthetic sequence
tccgggtttctagctctgaa

SEQ ID NO: 435 - DNA, 19 bp, Artificial Sequence
  Synthetic sequence
tccgggtttctagctctga

SEQ ID NO: 436 - DNA, 19 bp, Artificial Sequence
  Synthetic sequence
tccgggtttctagctctga

SEQ ID NO: 437 - DNA, 19 bp, Artificial Sequence
  Synthetic sequence
tccgggtttctagctctga

SEQ ID NO: 438 - DNA, 19 bp, Artificial Sequence
  Synthetic sequence
tccgggtttctagctctga

SEQ ID NO: 439 - DNA, 19 bp, Artificial Sequence
  Synthetic sequence
tccgggtttctagctctga

SEQ ID NO: 440 - DNA, 19 bp, Artificial Sequence
  Synthetic sequence
ccgggtttctagctctgaa

SEQ ID NO: 441 - DNA, 19 bp, Artificial Sequence
  Synthetic sequence
ccgggtttctagctctgaa

SEQ ID NO: 442 - DNA, 19 bp, Artificial Sequence
  Synthetic sequence
ccgggtttctagctctgaa

SEQ ID NO: 443 - DNA, 19 bp, Artificial Sequence
  Synthetic sequence
ccgggtttctagctctgaa

SEQ ID NO: 444 - DNA, 19 bp, Artificial Sequence
  Synthetic sequence
ccgggtttctagctctgaa

SEQ ID NO: 445 - DNA, 20 bp, Artificial Sequence
  Synthetic sequence
tccgggtttctagctctgaa

SEQ ID NO: 446 - DNA, 20 bp, Artificial Sequence
  Synthetic sequence
tccgggtttctagctctgaa

SEQ ID NO: 447 - DNA, 20 bp, Artificial Sequence
  Synthetic sequence
tccgggtttctagctctgaa

SEQ ID NO: 448 - DNA, 20 bp, Artificial Sequence
  Synthetic sequence
tccgggtttctagctctgaa

SEQ ID NO: 449 - DNA, 20 bp, Artificial Sequence
  Synthetic sequence
tccgggtttctagctctgaa

SEQ ID NO: 450 - DNA, 20 bp, Artificial Sequence
  Synthetic sequence
tccgggtttctagctctgaa

SEQ ID NO: 451 - DNA, 20 bp, Artificial Sequence
  Synthetic sequence
tccgggtttctagctctgaa

SEQ ID NO: 452 - DNA, 20 bp, Artificial Sequence
  Synthetic sequence
tccgggtttctagctctgaa

SEQ ID NO: 453 - DNA, 19 bp, Artificial Sequence
  Synthetic sequence
tccgggtttctagctctga

SEQ ID NO: 454 - DNA, 19 bp, Artificial Sequence
  Synthetic sequence
tccgggtttctagctctga

SEQ ID NO: 455 - DNA, 19 bp, Artificial Sequence
  Synthetic sequence
tccgggtttctagctctga

SEQ ID NO: 456 - DNA, 19 bp, Artificial Sequence
  Synthetic sequence
tccgggtttctagctctga

SEQ ID NO: 457 - DNA, 20 bp, Artificial Sequence
  Synthetic sequence
tccgggtttctagctctgaa

SEQ ID NO: 458 - DNA, 20 bp, Artificial Sequence
  Synthetic sequence
tccgggtttctagctctgaa

SEQ ID NO: 459 - DNA, 20 bp, Artificial Sequence
  Synthetic sequence
tccgggtttctagctctgaa

SEQ ID NO: 460 - DNA, 18 bp, Artificial Sequence
  Synthetic sequence
tccgggtttctagctctg

SEQ ID NO: 461 - DNA, 18 bp, Artificial Sequence
  Synthetic sequence
tccgggtttctagctctg

SEQ ID NO: 462 - DNA, 18 bp, Artificial Sequence
  Synthetic sequence
tccgggtttctagctctg

SEQ ID NO: 463 - DNA, 18 bp, Artificial Sequence
  Synthetic sequence
tccgggtttctagctctg

SEQ ID NO: 464 - DNA, 18 bp, Artificial Sequence
  Synthetic sequence
cgggtttctagctctgaa

SEQ ID NO: 465 - DNA, 18 bp, Artificial Sequence
  Synthetic sequence
cgggtttctagctctgaa

SEQ ID NO: 466 - DNA, 18 bp, Artificial Sequence
  Synthetic sequence
cgggtttctagctctgaa

SEQ ID NO: 467 - DNA, 18 bp, Artificial Sequence
  Synthetic sequence
cgggtttctagctctgaa

SEQ ID NO: 468 - DNA, 20 bp, Artificial Sequence
  Synthetic sequence
tccgggtttctagctctgaa

SEQ ID NO: 469 - DNA, 20 bp, Artificial Sequence
  Synthetic sequence
tccgggtttctagctctgaa

SEQ ID NO: 470 - DNA, 20 bp, Artificial Sequence
  Synthetic sequence
tccgggtttctagctctgaa

SEQ ID NO: 471 - DNA, 20 bp, Artificial Sequence
  Synthetic sequence
tccgggtttctagctctgaa

SEQ ID NO: 472 - DNA, 20 bp, Artificial Sequence
  Synthetic sequence
tccgggtttctagctctgaa

SEQ ID NO: 473 - DNA, 20 bp, Artificial Sequence
  Synthetic sequence
tccgggtttctagctctgaa

SEQ ID NO: 474 - DNA, 19 bp, Artificial Sequence
  Synthetic sequence
tccgggtttctagctctga

SEQ ID NO: 475 - DNA, 19 bp, Artificial Sequence
  Synthetic sequence
tccgggtttctagctctga

SEQ ID NO: 476 - DNA, 19 bp, Artificial Sequence
  Synthetic sequence
tccgggtttctagctctga

SEQ ID NO: 477 - DNA, 19 bp, Artificial Sequence
  Synthetic sequence
ccgggtttctagctctgaa

SEQ ID NO: 478 - DNA, 19 bp, Artificial Sequence
  Synthetic sequence
ccgggtttctagctctgaa

SEQ ID NO: 479 - DNA, 19 bp, Artificial Sequence
  Synthetic sequence
ccgggtttctagctctgaa

SEQ ID NO: 480 - DNA, 18 bp, Artificial Sequence
  Synthetic sequence
tccgggtttctagctctg

SEQ ID NO: 481 - DNA, 18 bp, Artificial Sequence
  Synthetic sequence
tccgggtttctagctctg

SEQ ID NO: 482 - DNA, 18 bp, Artificial Sequence
  Synthetic sequence
tccgggtttctagctctg

SEQ ID NO: 483 - DNA, 18 bp, Artificial Sequence
  Synthetic sequence
cgggtttctagctctgaa

SEQ ID NO: 484 - DNA, 18 bp, Artificial Sequence
  Synthetic sequence
cgggtttctagctctgaa

SEQ ID NO: 485 - DNA, 18 bp, Artificial Sequence
  Synthetic sequence
cgggtttctagctctgaa

SEQ ID NO: 486 - DNA, 17 bp, Artificial Sequence
  Synthetic sequence
tccgggtttctagctct

SEQ ID NO: 487 - DNA, 17 bp, Artificial Sequence
  Synthetic sequence
tccgggtttctagctct

SEQ ID NO: 488 - DNA, 17 bp, Artificial Sequence
  Synthetic sequence
tccgggtttctagctct

SEQ ID NO: 489 - DNA, 17 bp, Artificial Sequence
  Synthetic sequence
gggtttctagctctgaa

SEQ ID NO: 490 - DNA, 17 bp, Artificial Sequence
  Synthetic sequence
gggtttctagctctgaa

SEQ ID NO: 491 - DNA, 17 bp, Artificial Sequence
  Synthetic sequence
gggtttctagctctgaa

SEQ ID NO: 492 - DNA, 19 bp, Artificial Sequence
  Synthetic sequence
ccgggtttctagctctgaa

SEQ ID NO: 493 - DNA, 19 bp, Artificial Sequence
  Synthetic sequence
ccgggtttctagctctgaa

SEQ ID NO: 494 - DNA, 19 bp, Artificial Sequence
  Synthetic sequence
tccgggtttctagctctga

SEQ ID NO: 495 - DNA, 19 bp, Artificial Sequence
  Synthetic sequence
tccgggtttctagctctga

SEQ ID NO: 496 - DNA, 18 bp, Artificial Sequence
  Synthetic sequence
ccgggtttctagctctga

SEQ ID NO: 497 - DNA, 18 bp, Artificial Sequence
  Synthetic sequence
ccgggtttctagctctga

SEQ ID NO: 498 - DNA, 18 bp, Artificial Sequence
  Synthetic sequence
ccgggtttctagctctga

SEQ ID NO: 499 - DNA, 18 bp, Artificial Sequence
  Synthetic sequence
ccgggtttctagctctga

SEQ ID NO: 500 - DNA, 17 bp, Artificial Sequence
  Synthetic sequence
ccgggtttctagctctg

SEQ ID NO: 501 - DNA, 17 bp, Artificial Sequence
  Synthetic sequence
ccgggtttctagctctg

SEQ ID NO: 502 - DNA, 17 bp, Artificial Sequence
  Synthetic sequence
ccgggtttctagctctg

SEQ ID NO: 503 - DNA, 20 bp, Artificial Sequence
  Synthetic sequence
tccgggtttctagctctgaa

SEQ ID NO: 504 - DNA, 20 bp, Artificial Sequence
  Synthetic sequence
tccgggtttctagctctgaa

SEQ ID NO: 505 - DNA, 20 bp, Artificial Sequence
  Synthetic sequence
tccgggtttctagctctgaa

SEQ ID NO: 506 - DNA, 20 bp, Artificial Sequence
  Synthetic sequence
tccgggtttctagctctgaa

SEQ ID NO: 507 - DNA, 19 bp, Artificial Sequence
  Synthetic sequence
tccgggtttctagctctga

SEQ ID NO: 508 - DNA, 19 bp, Artificial Sequence
  Synthetic sequence
ccgggtttctagctctgaa

SEQ ID NO: 509 - DNA, 20 bp, Artificial Sequence
  Synthetic sequence
tccgggtttctagctctgaa

SEQ ID NO: 510 - DNA, 20 bp, Artificial Sequence
  Synthetic sequence
tccgggtttctagctctgaa

SEQ ID NO: 511 - DNA, 19 bp, Artificial Sequence
  Synthetic sequence
tccgggtttctagctctga

SEQ ID NO: 512 - DNA, 20 bp, Artificial Sequence
  Synthetic sequence
tccgggtttctagctctgaa

SEQ ID NO: 513 - DNA, 18 bp, Artificial Sequence
  Synthetic sequence
tccgggtttctagctctg

SEQ ID NO: 514 - DNA, 18 bp, Artificial Sequence
  Synthetic sequence
cgggtttctagctctgaa

SEQ ID NO: 515 - DNA, 20 bp, Artificial Sequence
  Synthetic sequence
tccgggtttctagctctgaa

SEQ ID NO: 516 - DNA, 19 bp, Artificial Sequence
  Synthetic sequence
tccgggtttctagctctga

SEQ ID NO: 517 - DNA, 18 bp, Artificial Sequence
  Synthetic sequence
tccgggtttctagctctg

SEQ ID NO: 518 - DNA, 18 bp, Artificial Sequence
  Synthetic sequence
cgggtttctagctctgaa

SEQ ID NO: 519 - DNA, 17 bp, Artificial Sequence
  Synthetic sequence
tccgggtttctagctct

SEQ ID NO: 520 - DNA, 17 bp, Artificial Sequence
  Synthetic sequence
gggtttctagctctgaa

SEQ ID NO: 521 - DNA, 19 bp, Artificial Sequence
  Synthetic sequence
ccgggtttctagctctgaa

SEQ ID NO: 522 - DNA, 18 bp, Artificial Sequence
  Synthetic sequence
ccgggtttctagctctga

SEQ ID NO: 523 - DNA, 17 bp, Artificial Sequence
  Synthetic sequence
ccgggtttctagctctg

SEQ ID NO: 524 - DNA, 20 bp, Artificial Sequence
  Synthetic sequence
tccgggtttctagctctgaa

SEQ ID NO: 525 - DNA, 20 bp, Artificial Sequence
  Synthetic sequence
tccgggtttctagctctgaa

SEQ ID NO: 526 - DNA, 20 bp, Artificial Sequence
  Synthetic sequence
tccgggtttctagctctgaa

SEQ ID NO: 527 - DNA, 20 bp, Artificial Sequence
  Synthetic sequence
tccgggtttctagctctgaa

SEQ ID NO: 528 - DNA, 20 bp, Artificial Sequence
  Synthetic sequence
tccgggtttctagctctgaa

SEQ ID NO: 529 - DNA, 20 bp, Artificial Sequence
  Synthetic sequence
tccgggtttctagctctgaa

SEQ ID NO: 530 - DNA, 20 bp, Artificial Sequence
  Synthetic sequence
tccgggtttctagctctgaa

SEQ ID NO: 531 - DNA, 20 bp, Artificial Sequence
  Synthetic sequence
tccgggtttctagctctgaa

SEQ ID NO: 532 - DNA, 20 bp, Artificial Sequence
  Synthetic sequence
tccgggtttctagctctgaa

SEQ ID NO: 533 - DNA, 20 bp, Artificial Sequence
  Synthetic sequence
tccgggtttctagctctgaa

SEQ ID NO: 534 - DNA, 20 bp, Artificial Sequence
  Synthetic sequence
tccgggtttctagctctgaa

SEQ ID NO: 535 - DNA, 20 bp, Artificial Sequence
  Synthetic sequence
tccgggtttctagctctgaa

SEQ ID NO: 536 - DNA, 20 bp, Artificial Sequence
  Synthetic sequence
tccgggtttctagctctgaa

SEQ ID NO: 537 - DNA, 20 bp, Artificial Sequence
  Synthetic sequence
tccgggtttctagctctgaa

SEQ ID NO: 538 - DNA, 20 bp, Artificial Sequence
  Synthetic sequence
tccgggtttctagctctgaa

SEQ ID NO: 539 - DNA, 21 bp, Artificial Sequence
  Synthetic sequence
tccgggtttctagctctgaac

SEQ ID NO: 540 - DNA, 21 bp, Artificial Sequence
  Synthetic sequence
tccgggtttctagctctgaac

SEQ ID NO: 541 - DNA, 21 bp, Artificial Sequence
  Synthetic sequence
tccgggtttctagctctgaac

SEQ ID NO: 542 - DNA, 21 bp, Artificial Sequence
  Synthetic sequence
tccgggtttctagctctgaac

SEQ ID NO: 543 - DNA, 21 bp, Artificial Sequence
  Synthetic sequence
tccgggtttctagctctgaac

SEQ ID NO: 544 - DNA, 21 bp, Artificial Sequence
  Synthetic sequence
tccgggtttctagctctgaac

SEQ ID NO: 545 - DNA, 21 bp, Artificial Sequence
  Synthetic sequence
tccgggtttctagctctgaac

SEQ ID NO: 546 - DNA, 21 bp, Artificial Sequence
  Synthetic sequence
tccgggtttctagctctgaac

SEQ ID NO: 547 - DNA, 21 bp, Artificial Sequence
  Synthetic sequence
tccgggtttctagctctgaac

SEQ ID NO: 548 - DNA, 21 bp, Artificial Sequence
  Synthetic sequence
tccgggtttctagctctgaac

SEQ ID NO: 549 - DNA, 21 bp, Artificial Sequence
  Synthetic sequence
tccgggtttctagctctgaac

SEQ ID NO: 550 - DNA, 21 bp, Artificial Sequence
  Synthetic sequence
tccgggtttctagctctgaac

SEQ ID NO: 551 - DNA, 21 bp, Artificial Sequence
  Synthetic sequence
tccgggtttctagctctgaac

SEQ ID NO: 552 - DNA, 21 bp, Artificial Sequence
  Synthetic sequence
tccgggtttctagctctgaac

SEQ ID NO: 553 - DNA, 21 bp, Artificial Sequence
  Synthetic sequence
tccgggtttctagctctgaac

SEQ ID NO: 554 - DNA, 21 bp, Artificial Sequence
  Synthetic sequence
tccgggtttctagctctgaac

SEQ ID NO: 555 - DNA, 22 bp, Artificial Sequence
  Synthetic sequence
tccgggtttctagctctgaacg

SEQ ID NO: 556 - DNA, 22 bp, Artificial Sequence
  Synthetic sequence
tccgggtttctagctctgaacg

SEQ ID NO: 557 - DNA, 22 bp, Artificial Sequence
  Synthetic sequence
tccgggtttctagctctgaacg

SEQ ID NO: 558 - DNA, 22 bp, Artificial Sequence
  Synthetic sequence
tccgggtttctagctctgaacg

SEQ ID NO: 559 - DNA, 22 bp, Artificial Sequence
  Synthetic sequence
tccgggtttctagctctgaacg

SEQ ID NO: 560 - DNA, 22 bp, Artificial Sequence
  Synthetic sequence
tccgggtttctagctctgaacg

SEQ ID NO: 561 - DNA, 22 bp, Artificial Sequence
  Synthetic sequence
tccgggtttctagctctgaacg

SEQ ID NO: 562 - DNA, 22 bp, Artificial Sequence
  Synthetic sequence
tccgggtttctagctctgaacg

SEQ ID NO: 563 - DNA, 22 bp, Artificial Sequence
  Synthetic sequence
tccgggtttctagctctgaacg

SEQ ID NO: 564 - DNA, 22 bp, Artificial Sequence
  Synthetic sequence
tccgggtttctagctctgaacg

SEQ ID NO: 565 - DNA, 22 bp, Artificial Sequence
  Synthetic sequence
tccgggtttctagctctgaacg

SEQ ID NO: 566 - DNA, 22 bp, Artificial Sequence
  Synthetic sequence
tccgggtttctagctctgaacg

SEQ ID NO: 567 - DNA, 22 bp, Artificial Sequence
  Synthetic sequence
tccgggtttctagctctgaacg

SEQ ID NO: 568 - DNA, 22 bp, Artificial Sequence
  Synthetic sequence
tccgggtttctagctctgaacg

SEQ ID NO: 569 - DNA, 22 bp, Artificial Sequence
  Synthetic sequence
tccgggtttctagctctgaacg

SEQ ID NO: 570 - DNA, 22 bp, Artificial Sequence
  Synthetic sequence
tccgggtttctagctctgaacg

SEQ ID NO: 571 - DNA, 23 bp, Artificial Sequence
  Synthetic sequence
tccgggtttctagctctgaacga

SEQ ID NO: 572 - DNA, 23 bp, Artificial Sequence
  Synthetic sequence
tccgggtttctagctctgaacga

SEQ ID NO: 573 - DNA, 23 bp, Artificial Sequence
  Synthetic sequence
tccgggtttctagctctgaacga

SEQ ID NO: 574 - DNA, 23 bp, Artificial Sequence
  Synthetic sequence
tccgggtttctagctctgaacga

SEQ ID NO: 575 - DNA, 23 bp, Artificial Sequence
  Synthetic sequence
tccgggtttctagctctgaacga

SEQ ID NO: 576 - DNA, 23 bp, Artificial Sequence
  Synthetic sequence
tccgggtttctagctctgaacga

SEQ ID NO: 577 - DNA, 23 bp, Artificial Sequence
  Synthetic sequence
tccgggtttctagctctgaacga

SEQ ID NO: 578 - DNA, 23 bp, Artificial Sequence
  Synthetic sequence
tccgggtttctagctctgaacga

SEQ ID NO: 579 - DNA, 23 bp, Artificial Sequence
  Synthetic sequence
tccgggtttctagctctgaacga

SEQ ID NO: 580 - DNA, 23 bp, Artificial Sequence
  Synthetic sequence
tccgggtttctagctctgaacga

SEQ ID NO: 581 - DNA, 23 bp, Artificial Sequence
  Synthetic sequence
tccgggtttctagctctgaacga

SEQ ID NO: 582 - DNA, 23 bp, Artificial Sequence
  Synthetic sequence
tccgggtttctagctctgaacga

SEQ ID NO: 583 - DNA, 23 bp, Artificial Sequence
  Synthetic sequence
tccgggtttctagctctgaacga

SEQ ID NO: 584 - DNA, 23 bp, Artificial Sequence
  Synthetic sequence
tccgggtttctagctctgaacga

SEQ ID NO: 585 - DNA, 23 bp, Artificial Sequence
  Synthetic sequence
tccgggtttctagctctgaacga

SEQ ID NO: 586 - DNA, 23 bp, Artificial Sequence
  Synthetic sequence
tccgggtttctagctctgaacga

SEQ ID NO: 587 - DNA, 21 bp, Artificial Sequence
  Synthetic sequence
tccgggtttctagctctgaac

SEQ ID NO: 588 - DNA, 21 bp, Artificial Sequence
  Synthetic sequence
tccgggtttctagctctgaac

SEQ ID NO: 589 - DNA, 21 bp, Artificial Sequence
  Synthetic sequence
tccgggtttctagctctgaac

SEQ ID NO: 590 - DNA, 21 bp, Artificial Sequence
  Synthetic sequence
tccgggtttctagctctgaac

SEQ ID NO: 591 - DNA, 21 bp, Artificial Sequence
  Synthetic sequence
tccgggtttctagctctgaac

SEQ ID NO: 592 - DNA, 21 bp, Artificial Sequence
  Synthetic sequence
tccgggtttctagctctgaac

SEQ ID NO: 593 - DNA, 21 bp, Artificial Sequence
  Synthetic sequence
tccgggtttctagctctgaac

SEQ ID NO: 594 - DNA, 21 bp, Artificial Sequence
  Synthetic sequence
tccgggtttctagctctgaac

SEQ ID NO: 595 - DNA, 21 bp, Artificial Sequence
  Synthetic sequence
tccgggtttctagctctgaac

SEQ ID NO: 596 - DNA, 21 bp, Artificial Sequence
  Synthetic sequence
tccgggtttctagctctgaac

SEQ ID NO: 597 - DNA, 21 bp, Artificial Sequence
  Synthetic sequence
tccgggtttctagctctgaac

SEQ ID NO: 598 - DNA, 21 bp, Artificial Sequence
  Synthetic sequence
tccgggtttctagctctgaac

SEQ ID NO: 599 - DNA, 21 bp, Artificial Sequence
  Synthetic sequence
tccgggtttctagctctgaac

SEQ ID NO: 600 - DNA, 21 bp, Artificial Sequence
  Synthetic sequence
tccgggtttctagctctgaac

SEQ ID NO: 601 - DNA, 21 bp, Artificial Sequence
  Synthetic sequence
tccgggtttctagctctgaac

SEQ ID NO: 602 - DNA, 21 bp, Artificial Sequence
  Synthetic sequence
tccgggtttctagctctgaac

SEQ ID NO: 603 - DNA, 22 bp, Artificial Sequence
  Synthetic sequence
tccgggtttctagctctgaacg

SEQ ID NO: 604 - DNA, 22 bp, Artificial Sequence
  Synthetic sequence
tccgggtttctagctctgaacg

SEQ ID NO: 605 - DNA, 22 bp, Artificial Sequence
  Synthetic sequence
tccgggtttctagctctgaacg

SEQ ID NO: 606 - DNA, 22 bp, Artificial Sequence
  Synthetic sequence
tccgggtttctagctctgaacg

SEQ ID NO: 607 - DNA, 22 bp, Artificial Sequence
  Synthetic sequence
tccgggtttctagctctgaacg

SEQ ID NO: 608 - DNA, 22 bp, Artificial Sequence
  Synthetic sequence
tccgggtttctagctctgaacg

SEQ ID NO: 609 - DNA, 22 bp, Artificial Sequence
  Synthetic sequence
tccgggtttctagctctgaacg

SEQ ID NO: 610 - DNA, 22 bp, Artificial Sequence
  Synthetic sequence
tccgggtttctagctctgaacg

SEQ ID NO: 611 - DNA, 22 bp, Artificial Sequence
  Synthetic sequence
tccgggtttctagctctgaacg

SEQ ID NO: 612 - DNA, 22 bp, Artificial Sequence
  Synthetic sequence
tccgggtttctagctctgaacg

SEQ ID NO: 613 - DNA, 22 bp, Artificial Sequence
  Synthetic sequence
tccgggtttctagctctgaacg

SEQ ID NO: 614 - DNA, 22 bp, Artificial Sequence
  Synthetic sequence
tccgggtttctagctctgaacg

SEQ ID NO: 615 - DNA, 22 bp, Artificial Sequence
  Synthetic sequence
tccgggtttctagctctgaacg

SEQ ID NO: 616 - DNA, 22 bp, Artificial Sequence
  Synthetic sequence
tccgggtttctagctctgaacg

SEQ ID NO: 617 - DNA, 22 bp, Artificial Sequence
  Synthetic sequence
tccgggtttctagctctgaacg

SEQ ID NO: 618 - DNA, 22 bp, Artificial Sequence
  Synthetic sequence
tccgggtttctagctctgaacg

SEQ ID NO: 619 - DNA, 20 bp, Artificial Sequence
  Synthetic sequence
atccgggtttctagctctga

SEQ ID NO: 620 - DNA, 20 bp, Artificial Sequence
  Synthetic sequence
atccgggtttctagctctga

SEQ ID NO: 621 - DNA, 20 bp, Artificial Sequence
  Synthetic sequence
atccgggtttctagctctga

SEQ ID NO: 622 - DNA, 20 bp, Artificial Sequence
  Synthetic sequence
atccgggtttctagctctga

SEQ ID NO: 623 - DNA, 20 bp, Artificial Sequence
  Synthetic sequence
atccgggtttctagctctga

SEQ ID NO: 624 - DNA, 20 bp, Artificial Sequence
  Synthetic sequence
atccgggtttctagctctga

SEQ ID NO: 625 - DNA, 20 bp, Artificial Sequence
  Synthetic sequence
atccgggtttctagctctga

SEQ ID NO: 626 - DNA, 20 bp, Artificial Sequence
  Synthetic sequence
atccgggtttctagctctga

SEQ ID NO: 627 - DNA, 20 bp, Artificial Sequence
  Synthetic sequence
atccgggtttctagctctga

SEQ ID NO: 628 - DNA, 20 bp, Artificial Sequence
  Synthetic sequence
atccgggtttctagctctga

SEQ ID NO: 629 - DNA, 20 bp, Artificial Sequence
  Synthetic sequence
atccgggtttctagctctga

SEQ ID NO: 630 - DNA, 20 bp, Artificial Sequence
  Synthetic sequence
atccgggtttctagctctga

SEQ ID NO: 631 - DNA, 20 bp, Artificial Sequence
  Synthetic sequence
atccgggtttctagctctga

SEQ ID NO: 632 - DNA, 20 bp, Artificial Sequence
  Synthetic sequence
atccgggtttctagctctga

SEQ ID NO: 633 - DNA, 20 bp, Artificial Sequence
  Synthetic sequence
atccgggtttctagctctga

SEQ ID NO: 634 - DNA, 20 bp, Artificial Sequence
  Synthetic sequence
atccgggtttctagctctga

SEQ ID NO: 635 - DNA, 20 bp, Artificial Sequence
  Synthetic sequence
atccgggtttctagctctga

SEQ ID NO: 636 - DNA, 20 bp, Artificial Sequence
  Synthetic sequence
atccgggtttctagctctga

SEQ ID NO: 637 - DNA, 20 bp, Artificial Sequence
  Synthetic sequence
atccgggtttctagctctga

SEQ ID NO: 638 - DNA, 20 bp, Artificial Sequence
  Synthetic sequence
atccgggtttctagctctga

SEQ ID NO: 639 - DNA, 20 bp, Artificial Sequence
  Synthetic sequence
atccgggtttctagctctga

SEQ ID NO: 640 - DNA, 20 bp, Artificial Sequence
  Synthetic sequence
atccgggtttctagctctga

SEQ ID NO: 641 - DNA, 19 bp, Artificial Sequence
  Synthetic sequence
atccgggtttctagctctg

SEQ ID NO: 642 - DNA, 19 bp, Artificial Sequence
  Synthetic sequence
atccgggtttctagctctg

SEQ ID NO: 643 - DNA, 19 bp, Artificial Sequence
  Synthetic sequence
atccgggtttctagctctg

SEQ ID NO: 644 - DNA, 19 bp, Artificial Sequence
  Synthetic sequence
atccgggtttctagctctg

SEQ ID NO: 645 - DNA, 19 bp, Artificial Sequence
  Synthetic sequence
atccgggtttctagctctg

SEQ ID NO: 646 - DNA, 19 bp, Artificial Sequence
  Synthetic sequence
tccgggtttctagctctga

SEQ ID NO: 647 - DNA, 19 bp, Artificial Sequence
  Synthetic sequence
tccgggtttctagctctga

SEQ ID NO: 648 - DNA, 19 bp, Artificial Sequence
  Synthetic sequence
tccgggtttctagctctga

SEQ ID NO: 649 - DNA, 19 bp, Artificial Sequence
  Synthetic sequence
tccgggtttctagctctga

SEQ ID NO: 650 - DNA, 19 bp, Artificial Sequence
  Synthetic sequence
tccgggtttctagctctga

SEQ ID NO: 651 - DNA, 20 bp, Artificial Sequence
  Synthetic sequence
atccgggtttctagctctga

SEQ ID NO: 652 - DNA, 20 bp, Artificial Sequence
  Synthetic sequence
atccgggtttctagctctga

SEQ ID NO: 653 - DNA, 20 bp, Artificial Sequence
  Synthetic sequence
atccgggtttctagctctga

SEQ ID NO: 654 - DNA, 20 bp, Artificial Sequence
  Synthetic sequence
atccgggtttctagctctga

SEQ ID NO: 655 - DNA, 20 bp, Artificial Sequence
  Synthetic sequence
atccgggtttctagctctga

SEQ ID NO: 656 - DNA, 20 bp, Artificial Sequence
  Synthetic sequence
atccgggtttctagctctga

SEQ ID NO: 657 - DNA, 20 bp, Artificial Sequence
  Synthetic sequence
atccgggtttctagctctga

SEQ ID NO: 658 - DNA, 20 bp, Artificial Sequence
  Synthetic sequence
atccgggtttctagctctga

SEQ ID NO: 659 - DNA, 19 bp, Artificial Sequence
  Synthetic sequence
atccgggtttctagctctg

SEQ ID NO: 660 - DNA, 19 bp, Artificial Sequence
  Synthetic sequence
atccgggtttctagctctg

SEQ ID NO: 661 - DNA, 19 bp, Artificial Sequence
  Synthetic sequence
atccgggtttctagctctg

SEQ ID NO: 662 - DNA, 19 bp, Artificial Sequence
  Synthetic sequence
atccgggtttctagctctg

SEQ ID NO: 663 - DNA, 20 bp, Artificial Sequence
  Synthetic sequence
atccgggtttctagctctga

SEQ ID NO: 664 - DNA, 20 bp, Artificial Sequence
  Synthetic sequence
atccgggtttctagctctga

SEQ ID NO: 665 - DNA, 20 bp, Artificial Sequence
  Synthetic sequence
atccgggtttctagctctga

SEQ ID NO: 666 - DNA, 18 bp, Artificial Sequence
  Synthetic sequence
atccgggtttctagctct

SEQ ID NO: 667 - DNA, 18 bp, Artificial Sequence
  Synthetic sequence
atccgggtttctagctct

SEQ ID NO: 668 - DNA, 18 bp, Artificial Sequence
  Synthetic sequence
atccgggtttctagctct

SEQ ID NO: 669 - DNA, 18 bp, Artificial Sequence
  Synthetic sequence
atccgggtttctagctct

SEQ ID NO: 670 - DNA, 18 bp, Artificial Sequence
  Synthetic sequence
ccgggtttctagctctga

SEQ ID NO: 671 - DNA, 18 bp, Artificial Sequence
  Synthetic sequence
ccgggtttctagctctga

SEQ ID NO: 672 - DNA, 18 bp, Artificial Sequence
  Synthetic sequence
ccgggtttctagctctga

SEQ ID NO: 673 - DNA, 18 bp, Artificial Sequence
  Synthetic sequence
ccgggtttctagctctga

SEQ ID NO: 674 - DNA, 20 bp, Artificial Sequence
  Synthetic sequence
atccgggtttctagctctga

SEQ ID NO: 675 - DNA, 20 bp, Artificial Sequence
  Synthetic sequence
atccgggtttctagctctga

SEQ ID NO: 676 - DNA, 20 bp, Artificial Sequence
  Synthetic sequence
atccgggtttctagctctga

SEQ ID NO: 677 - DNA, 20 bp, Artificial Sequence
  Synthetic sequence
atccgggtttctagctctga

SEQ ID NO: 678 - DNA, 20 bp, Artificial Sequence
  Synthetic sequence
atccgggtttctagctctga

SEQ ID NO: 679 - DNA, 20 bp, Artificial Sequence
  Synthetic sequence
atccgggtttctagctctga

SEQ ID NO: 680 - DNA, 19 bp, Artificial Sequence
  Synthetic sequence
atccgggtttctagctctg

SEQ ID NO: 681 - DNA, 19 bp, Artificial Sequence
  Synthetic sequence
atccgggtttctagctctg

SEQ ID NO: 682 - DNA, 19 bp, Artificial Sequence
  Synthetic sequence
atccgggtttctagctctg

SEQ ID NO: 683 - DNA, 19 bp, Artificial Sequence
  Synthetic sequence
tccgggtttctagctctga

SEQ ID NO: 684 - DNA, 19 bp, Artificial Sequence
  Synthetic sequence
tccgggtttctagctctga

SEQ ID NO: 685 - DNA, 19 bp, Artificial Sequence
  Synthetic sequence
tccgggtttctagctctga

SEQ ID NO: 686 - DNA, 18 bp, Artificial Sequence
  Synthetic sequence
atccgggtttctagctct

SEQ ID NO: 687 - DNA, 18 bp, Artificial Sequence
  Synthetic sequence
atccgggtttctagctct

SEQ ID NO: 688 - DNA, 18 bp, Artificial Sequence
  Synthetic sequence
atccgggtttctagctct

SEQ ID NO: 689 - DNA, 18 bp, Artificial Sequence
  Synthetic sequence
ccgggtttctagctctga

SEQ ID NO: 690 - DNA, 18 bp, Artificial Sequence
  Synthetic sequence
ccgggtttctagctctga

SEQ ID NO: 691 - DNA, 18 bp, Artificial Sequence
  Synthetic sequence
ccgggtttctagctctga

SEQ ID NO: 692 - DNA, 17 bp, Artificial Sequence
  Synthetic sequence
atccgggtttctagctc

SEQ ID NO: 693 - DNA, 17 bp, Artificial Sequence
  Synthetic sequence
atccgggtttctagctc

SEQ ID NO: 694 - DNA, 17 bp, Artificial Sequence
  Synthetic sequence
atccgggtttctagctc

SEQ ID NO: 695 - DNA, 17 bp, Artificial Sequence
  Synthetic sequence
cgggtttctagctctga

SEQ ID NO: 696 - DNA, 17 bp, Artificial Sequence
  Synthetic sequence
cgggtttctagctctga

SEQ ID NO: 697 - DNA, 17 bp, Artificial Sequence
  Synthetic sequence
cgggtttctagctctga

SEQ ID NO: 698 - DNA, 19 bp, Artificial Sequence
  Synthetic sequence
tccgggtttctagctctga

SEQ ID NO: 699 - DNA, 19 bp, Artificial Sequence
  Synthetic sequence
tccgggtttctagctctga

SEQ ID NO: 700 - DNA, 19 bp, Artificial Sequence
  Synthetic sequence
atccgggtttctagctctg

SEQ ID NO: 701 - DNA, 19 bp, Artificial Sequence
  Synthetic sequence
atccgggtttctagctctg

SEQ ID NO: 702 - DNA, 18 bp, Artificial Sequence
  Synthetic sequence
tccgggtttctagctctg

SEQ ID NO: 703 - DNA, 18 bp, Artificial Sequence
  Synthetic sequence
tccgggtttctagctctg

SEQ ID NO: 704 - DNA, 18 bp, Artificial Sequence
  Synthetic sequence
tccgggtttctagctctg

SEQ ID NO: 705 - DNA, 18 bp, Artificial Sequence
  Synthetic sequence
tccgggtttctagctctg

SEQ ID NO: 706 - DNA, 17 bp, Artificial Sequence
  Synthetic sequence
tccgggtttctagctct

SEQ ID NO: 707 - DNA, 17 bp, Artificial Sequence
  Synthetic sequence
tccgggtttctagctct

SEQ ID NO: 708 - DNA, 17 bp, Artificial Sequence
  Synthetic sequence
tccgggtttctagctct

SEQ ID NO: 709 - DNA, 20 bp, Artificial Sequence
  Synthetic sequence
atccgggtttctagctctga

SEQ ID NO: 710 - DNA, 20 bp, Artificial Sequence
  Synthetic sequence
atccgggtttctagctctga

SEQ ID NO: 711 - DNA, 20 bp, Artificial Sequence
  Synthetic sequence
atccgggtttctagctctga

SEQ ID NO: 712 - DNA, 20 bp, Artificial Sequence
  Synthetic sequence
atccgggtttctagctctga

SEQ ID NO: 713 - DNA, 19 bp, Artificial Sequence
  Synthetic sequence
atccgggtttctagctctg

SEQ ID NO: 714 - DNA, 19 bp, Artificial Sequence
  Synthetic sequence
tccgggtttctagctctga

SEQ ID NO: 715 - DNA, 20 bp, Artificial Sequence
  Synthetic sequence
atccgggtttctagctctga

SEQ ID NO: 716 - DNA, 20 bp, Artificial Sequence
  Synthetic sequence
atccgggtttctagctctga

SEQ ID NO: 717 - DNA, 19 bp, Artificial Sequence
  Synthetic sequence
atccgggtttctagctctg

SEQ ID NO: 718 - DNA, 20 bp, Artificial Sequence
  Synthetic sequence
atccgggtttctagctctga

SEQ ID NO: 719 - DNA, 18 bp, Artificial Sequence
  Synthetic sequence
atccgggtttctagctct

SEQ ID NO: 720 - DNA, 18 bp, Artificial Sequence
  Synthetic sequence
ccgggtttctagctctga

SEQ ID NO: 721 - DNA, 20 bp, Artificial Sequence
  Synthetic sequence
atccgggtttctagctctga

SEQ ID NO: 722 - DNA, 19 bp, Artificial Sequence
  Synthetic sequence
atccgggtttctagctctg

SEQ ID NO: 723 - DNA, 18 bp, Artificial Sequence
  Synthetic sequence
atccgggtttctagctct

SEQ ID NO: 724 - DNA, 18 bp, Artificial Sequence
  Synthetic sequence
ccgggtttctagctctga

SEQ ID NO: 725 - DNA, 17 bp, Artificial Sequence
  Synthetic sequence
atccgggtttctagctc

SEQ ID NO: 726 - DNA, 17 bp, Artificial Sequence
  Synthetic sequence
cgggtttctagctctga

SEQ ID NO: 727 - DNA, 19 bp, Artificial Sequence
  Synthetic sequence
tccgggtttctagctctga

SEQ ID NO: 728 - DNA, 18 bp, Artificial Sequence
  Synthetic sequence
tccgggtttctagctctg

SEQ ID NO: 729 - DNA, 17 bp, Artificial Sequence
  Synthetic sequence
tccgggtttctagctct

SEQ ID NO: 730 - DNA, 20 bp, Artificial Sequence
  Synthetic sequence
atccgggtttctagctctga

SEQ ID NO: 731 - DNA, 20 bp, Artificial Sequence
  Synthetic sequence
atccgggtttctagctctga

SEQ ID NO: 732 - DNA, 20 bp, Artificial Sequence
  Synthetic sequence
atccgggtttctagctctga

SEQ ID NO: 733 - DNA, 20 bp, Artificial Sequence
  Synthetic sequence
atccgggtttctagctctga

SEQ ID NO: 734 - DNA, 20 bp, Artificial Sequence
  Synthetic sequence
atccgggtttctagctctga

SEQ ID NO: 735 - DNA, 20 bp, Artificial Sequence
  Synthetic sequence
atccgggtttctagctctga

SEQ ID NO: 736 - DNA, 20 bp, Artificial Sequence
  Synthetic sequence
atccgggtttctagctctga

SEQ ID NO: 737 - DNA, 20 bp, Artificial Sequence
  Synthetic sequence
atccgggtttctagctctga

SEQ ID NO: 738 - DNA, 20 bp, Artificial Sequence
  Synthetic sequence
atccgggtttctagctctga

SEQ ID NO: 739 - DNA, 20 bp, Artificial Sequence
  Synthetic sequence
atccgggtttctagctctga

SEQ ID NO: 740 - DNA, 20 bp, Artificial Sequence
  Synthetic sequence
atccgggtttctagctctga

SEQ ID NO: 741 - DNA, 20 bp, Artificial Sequence
  Synthetic sequence
atccgggtttctagctctga

SEQ ID NO: 742 - DNA, 20 bp, Artificial Sequence
  Synthetic sequence
atccgggtttctagctctga

SEQ ID NO: 743 - DNA, 20 bp, Artificial Sequence
  Synthetic sequence
atccgggtttctagctctga

SEQ ID NO: 744 - DNA, 20 bp, Artificial Sequence
  Synthetic sequence
atccgggtttctagctctga

SEQ ID NO: 745 - DNA, 21 bp, Artificial Sequence
  Synthetic sequence
atccgggtttctagctctgaa

SEQ ID NO: 746 - DNA, 21 bp, Artificial Sequence
  Synthetic sequence
atccgggtttctagctctgaa

SEQ ID NO: 747 - DNA, 21 bp, Artificial Sequence
  Synthetic sequence
atccgggtttctagctctgaa

SEQ ID NO: 748 - DNA, 21 bp, Artificial Sequence
  Synthetic sequence
atccgggtttctagctctgaa

SEQ ID NO: 749 - DNA, 21 bp, Artificial Sequence
  Synthetic sequence
atccgggtttctagctctgaa

SEQ ID NO: 750 - DNA, 21 bp, Artificial Sequence
  Synthetic sequence
atccgggtttctagctctgaa

SEQ ID NO: 751 - DNA, 21 bp, Artificial Sequence
  Synthetic sequence
atccgggtttctagctctgaa

SEQ ID NO: 752 - DNA, 21 bp, Artificial Sequence
  Synthetic sequence
atccgggtttctagctctgaa

SEQ ID NO: 753 - DNA, 21 bp, Artificial Sequence
  Synthetic sequence
atccgggtttctagctctgaa

SEQ ID NO: 754 - DNA, 21 bp, Artificial Sequence
  Synthetic sequence
atccgggtttctagctctgaa

SEQ ID NO: 755 - DNA, 21 bp, Artificial Sequence
  Synthetic sequence
atccgggtttctagctctgaa

SEQ ID NO: 756 - DNA, 21 bp, Artificial Sequence
  Synthetic sequence
atccgggtttctagctctgaa

SEQ ID NO: 757 - DNA, 21 bp, Artificial Sequence
  Synthetic sequence
atccgggtttctagctctgaa

SEQ ID NO: 758 - DNA, 21 bp, Artificial Sequence
  Synthetic sequence
atccgggtttctagctctgaa

SEQ ID NO: 759 - DNA, 21 bp, Artificial Sequence
  Synthetic sequence
atccgggtttctagctctgaa

SEQ ID NO: 760 - DNA, 21 bp, Artificial Sequence
  Synthetic sequence
atccgggtttctagctctgaa

SEQ ID NO: 761 - DNA, 22 bp, Artificial Sequence
  Synthetic sequence
atccgggtttctagctctgaac

SEQ ID NO: 762 - DNA, 22 bp, Artificial Sequence
  Synthetic sequence
atccgggtttctagctctgaac

SEQ ID NO: 763 - DNA, 22 bp, Artificial Sequence
  Synthetic sequence
atccgggtttctagctctgaac

SEQ ID NO: 764 - DNA, 22 bp, Artificial Sequence
  Synthetic sequence
atccgggtttctagctctgaac

SEQ ID NO: 765 - DNA, 22 bp, Artificial Sequence
  Synthetic sequence
atccgggtttctagctctgaac

SEQ ID NO: 766 - DNA, 22 bp, Artificial Sequence
  Synthetic sequence
atccgggtttctagctctgaac

SEQ ID NO: 767 - DNA, 22 bp, Artificial Sequence
  Synthetic sequence
atccgggtttctagctctgaac

SEQ ID NO: 768 - DNA, 22 bp, Artificial Sequence
  Synthetic sequence
atccgggtttctagctctgaac

SEQ ID NO: 769 - DNA, 22 bp, Artificial Sequence
  Synthetic sequence
atccgggtttctagctctgaac

SEQ ID NO: 770 - DNA, 22 bp, Artificial Sequence
  Synthetic sequence
atccgggtttctagctctgaac

SEQ ID NO: 771 - DNA, 22 bp, Artificial Sequence
  Synthetic sequence
atccgggtttctagctctgaac

SEQ ID NO: 772 - DNA, 22 bp, Artificial Sequence
  Synthetic sequence
atccgggtttctagctctgaac

SEQ ID NO: 773 - DNA, 22 bp, Artificial Sequence
  Synthetic sequence
atccgggtttctagctctgaac

SEQ ID NO: 774 - DNA, 22 bp, Artificial Sequence
  Synthetic sequence
atccgggtttctagctctgaac

SEQ ID NO: 775 - DNA, 22 bp, Artificial Sequence
  Synthetic sequence
atccgggtttctagctctgaac

SEQ ID NO: 776 - DNA, 22 bp, Artificial Sequence
  Synthetic sequence
atccgggtttctagctctgaac

SEQ ID NO: 777 - DNA, 23 bp, Artificial Sequence
  Synthetic sequence
atccgggtttctagctctgaacg

SEQ ID NO: 778 - DNA, 23 bp, Artificial Sequence
  Synthetic sequence
atccgggtttctagctctgaacg

SEQ ID NO: 779 - DNA, 23 bp, Artificial Sequence
  Synthetic sequence
atccgggtttctagctctgaacg

SEQ ID NO: 780 - DNA, 23 bp, Artificial Sequence
  Synthetic sequence
atccgggtttctagctctgaacg

SEQ ID NO: 781 - DNA, 23 bp, Artificial Sequence
  Synthetic sequence
atccgggtttctagctctgaacg

SEQ ID NO: 782 - DNA, 23 bp, Artificial Sequence
  Synthetic sequence
atccgggtttctagctctgaacg

SEQ ID NO: 783 - DNA, 23 bp, Artificial Sequence
  Synthetic sequence
atccgggtttctagctctgaacg

SEQ ID NO: 784 - DNA, 23 bp, Artificial Sequence
  Synthetic sequence
atccgggtttctagctctgaacg

SEQ ID NO: 785 - DNA, 23 bp, Artificial Sequence
  Synthetic sequence
atccgggtttctagctctgaacg

SEQ ID NO: 786 - DNA, 23 bp, Artificial Sequence
  Synthetic sequence
atccgggtttctagctctgaacg

SEQ ID NO: 787 - DNA, 23 bp, Artificial Sequence
  Synthetic sequence
atccgggtttctagctctgaacg

SEQ ID NO: 788 - DNA, 23 bp, Artificial Sequence
  Synthetic sequence
atccgggtttctagctctgaacg

SEQ ID NO: 789 - DNA, 23 bp, Artificial Sequence
  Synthetic sequence
atccgggtttctagctctgaacg

SEQ ID NO: 790 - DNA, 23 bp, Artificial Sequence
  Synthetic sequence
atccgggtttctagctctgaacg

SEQ ID NO: 791 - DNA, 23 bp, Artificial Sequence
  Synthetic sequence
atccgggtttctagctctgaacg

SEQ ID NO: 792 - DNA, 23 bp, Artificial Sequence
  Synthetic sequence
atccgggtttctagctctgaacg

SEQ ID NO: 793 - DNA, 21 bp, Artificial Sequence
  Synthetic sequence
atccgggtttctagctctgaa

SEQ ID NO: 794 - DNA, 21 bp, Artificial Sequence
  Synthetic sequence
atccgggtttctagctctgaa

SEQ ID NO: 795 - DNA, 21 bp, Artificial Sequence
  Synthetic sequence
atccgggtttctagctctgaa

SEQ ID NO: 796 - DNA, 21 bp, Artificial Sequence
  Synthetic sequence
atccgggtttctagctctgaa

SEQ ID NO: 797 - DNA, 21 bp, Artificial Sequence
  Synthetic sequence
atccgggtttctagctctgaa

SEQ ID NO: 798 - DNA, 21 bp, Artificial Sequence
  Synthetic sequence
atccgggtttctagctctgaa

SEQ ID NO: 799 - DNA, 21 bp, Artificial Sequence
  Synthetic sequence
atccgggtttctagctctgaa

SEQ ID NO: 800 - DNA, 21 bp, Artificial Sequence
  Synthetic sequence
atccgggtttctagctctgaa

SEQ ID NO: 801 - DNA, 21 bp, Artificial Sequence
  Synthetic sequence
atccgggtttctagctctgaa

SEQ ID NO: 802 - DNA, 21 bp, Artificial Sequence
  Synthetic sequence
atccgggtttctagctctgaa

SEQ ID NO: 803 - DNA, 21 bp, Artificial Sequence
  Synthetic sequence
atccgggtttctagctctgaa

SEQ ID NO: 804 - DNA, 21 bp, Artificial Sequence
  Synthetic sequence
atccgggtttctagctctgaa

SEQ ID NO: 805 - DNA, 21 bp, Artificial Sequence
  Synthetic sequence
atccgggtttctagctctgaa

SEQ ID NO: 806 - DNA, 21 bp, Artificial Sequence
  Synthetic sequence
atccgggtttctagctctgaa

SEQ ID NO: 807 - DNA, 21 bp, Artificial Sequence
  Synthetic sequence
atccgggtttctagctctgaa

SEQ ID NO: 808 - DNA, 21 bp, Artificial Sequence
  Synthetic sequence
atccgggtttctagctctgaa

SEQ ID NO: 809 - DNA, 22 bp, Artificial Sequence
  Synthetic sequence
atccgggtttctagctctgaac

SEQ ID NO: 810 - DNA, 22 bp, Artificial Sequence
  Synthetic sequence
atccgggtttctagctctgaac

SEQ ID NO: 811 - DNA, 22 bp, Artificial Sequence
  Synthetic sequence
atccgggtttctagctctgaac

SEQ ID NO: 812 - DNA, 22 bp, Artificial Sequence
  Synthetic sequence
atccgggtttctagctctgaac

SEQ ID NO: 813 - DNA, 22 bp, Artificial Sequence
  Synthetic sequence
atccgggtttctagctctgaac

SEQ ID NO: 814 - DNA, 22 bp, Artificial Sequence
  Synthetic sequence
atccgggtttctagctctgaac

SEQ ID NO: 815 - DNA, 22 bp, Artificial Sequence
  Synthetic sequence
atccgggtttctagctctgaac

SEQ ID NO: 816 - DNA, 22 bp, Artificial Sequence
  Synthetic sequence
atccgggtttctagctctgaac

SEQ ID NO: 817 - DNA, 22 bp, Artificial Sequence
  Synthetic sequence
atccgggtttctagctctgaac

SEQ ID NO: 818 - DNA, 22 bp, Artificial Sequence
  Synthetic sequence
atccgggtttctagctctgaac

SEQ ID NO: 819 - DNA, 22 bp, Artificial Sequence
  Synthetic sequence
atccgggtttctagctctgaac

SEQ ID NO: 820 - DNA, 22 bp, Artificial Sequence
  Synthetic sequence
atccgggtttctagctctgaac

SEQ ID NO: 821 - DNA, 22 bp, Artificial Sequence
  Synthetic sequence
atccgggtttctagctctgaac

SEQ ID NO: 822 - DNA, 22 bp, Artificial Sequence
  Synthetic sequence
atccgggtttctagctctgaac

SEQ ID NO: 823 - DNA, 22 bp, Artificial Sequence
  Synthetic sequence
atccgggtttctagctctgaac

SEQ ID NO: 824 - DNA, 22 bp, Artificial Sequence
  Synthetic sequence
atccgggtttctagctctgaac

SEQ ID NO: 825 - DNA, 20 bp, Artificial Sequence
  Synthetic sequence
catccgggtttctagctctg

SEQ ID NO: 826 - DNA, 20 bp, Artificial Sequence
  Synthetic sequence
catccgggtttctagctctg

SEQ ID NO: 827 - DNA, 20 bp, Artificial Sequence
  Synthetic sequence
catccgggtttctagctctg

SEQ ID NO: 828 - DNA, 20 bp, Artificial Sequence
  Synthetic sequence
catccgggtttctagctctg

SEQ ID NO: 829 - DNA, 20 bp, Artificial Sequence
  Synthetic sequence
catccgggtttctagctctg

SEQ ID NO: 830 - DNA, 20 bp, Artificial Sequence
  Synthetic sequence
catccgggtttctagctctg

SEQ ID NO: 831 - DNA, 20 bp, Artificial Sequence
  Synthetic sequence
catccgggtttctagctctg

SEQ ID NO: 832 - DNA, 20 bp, Artificial Sequence
  Synthetic sequence
catccgggtttctagctctg

SEQ ID NO: 833 - DNA, 20 bp, Artificial Sequence
  Synthetic sequence
catccgggtttctagctctg

SEQ ID NO: 834 - DNA, 20 bp, Artificial Sequence
  Synthetic sequence
catccgggtttctagctctg

SEQ ID NO: 835 - DNA, 20 bp, Artificial Sequence
  Synthetic sequence
catccgggtttctagctctg

SEQ ID NO: 836 - DNA, 20 bp, Artificial Sequence
  Synthetic sequence
catccgggtttctagctctg

SEQ ID NO: 837 - DNA, 20 bp, Artificial Sequence
  Synthetic sequence
catccgggtttctagctctg

SEQ ID NO: 838 - DNA, 20 bp, Artificial Sequence
  Synthetic sequence
catccgggtttctagctctg

SEQ ID NO: 839 - DNA, 20 bp, Artificial Sequence
  Synthetic sequence
catccgggtttctagctctg

SEQ ID NO: 840 - DNA, 20 bp, Artificial Sequence
  Synthetic sequence
catccgggtttctagctctg

SEQ ID NO: 841 - DNA, 20 bp, Artificial Sequence
  Synthetic sequence
catccgggtttctagctctg

SEQ ID NO: 842 - DNA, 20 bp, Artificial Sequence
  Synthetic sequence
catccgggtttctagctctg

SEQ ID NO: 843 - DNA, 20 bp, Artificial Sequence
  Synthetic sequence
catccgggtttctagctctg

SEQ ID NO: 844 - DNA, 20 bp, Artificial Sequence
  Synthetic sequence
catccgggtttctagctctg

SEQ ID NO: 845 - DNA, 20 bp, Artificial Sequence
  Synthetic sequence
catccgggtttctagctctg

SEQ ID NO: 846 - DNA, 20 bp, Artificial Sequence
  Synthetic sequence
catccgggtttctagctctg

SEQ ID NO: 847 - DNA, 19 bp, Artificial Sequence
  Synthetic sequence
catccgggtttctagctct

SEQ ID NO: 848 - DNA, 19 bp, Artificial Sequence
  Synthetic sequence
catccgggtttctagctct

SEQ ID NO: 849 - DNA, 19 bp, Artificial Sequence
  Synthetic sequence
catccgggtttctagctct

SEQ ID NO: 850 - DNA, 19 bp, Artificial Sequence
  Synthetic sequence
catccgggtttctagctct

SEQ ID NO: 851 - DNA, 19 bp, Artificial Sequence
  Synthetic sequence
catccgggtttctagctct

SEQ ID NO: 852 - DNA, 19 bp, Artificial Sequence
  Synthetic sequence
atccgggtttctagctctg

SEQ ID NO: 853 - DNA, 19 bp, Artificial Sequence
  Synthetic sequence
atccgggtttctagctctg

SEQ ID NO: 854 - DNA, 19 bp, Artificial Sequence
  Synthetic sequence
atccgggtttctagctctg

SEQ ID NO: 855 - DNA, 19 bp, Artificial Sequence
  Synthetic sequence
atccgggtttctagctctg

SEQ ID NO: 856 - DNA, 19 bp, Artificial Sequence
  Synthetic sequence
atccgggtttctagctctg

SEQ ID NO: 857 - DNA, 20 bp, Artificial Sequence
  Synthetic sequence
catccgggtttctagctctg

SEQ ID NO: 858 - DNA, 20 bp, Artificial Sequence
  Synthetic sequence
catccgggtttctagctctg

SEQ ID NO: 859 - DNA, 20 bp, Artificial Sequence
  Synthetic sequence
catccgggtttctagctctg

SEQ ID NO: 860 - DNA, 20 bp, Artificial Sequence
  Synthetic sequence
catccgggtttctagctctg

SEQ ID NO: 861 - DNA, 20 bp, Artificial Sequence
  Synthetic sequence
catccgggtttctagctctg

SEQ ID NO: 862 - DNA, 20 bp, Artificial Sequence
  Synthetic sequence
catccgggtttctagctctg

SEQ ID NO: 863 - DNA, 20 bp, Artificial Sequence
  Synthetic sequence
catccgggtttctagctctg

SEQ ID NO: 864 - DNA, 20 bp, Artificial Sequence
  Synthetic sequence
catccgggtttctagctctg

SEQ ID NO: 865 - DNA, 19 bp, Artificial Sequence
  Synthetic sequence
catccgggtttctagctct

SEQ ID NO: 866 - DNA, 19 bp, Artificial Sequence
  Synthetic sequence
catccgggtttctagctct

SEQ ID NO: 867 - DNA, 19 bp, Artificial Sequence
  Synthetic sequence
catccgggtttctagctct

SEQ ID NO: 868 - DNA, 19 bp, Artificial Sequence
  Synthetic sequence
catccgggtttctagctct

SEQ ID NO: 869 - DNA, 20 bp, Artificial Sequence
  Synthetic sequence
catccgggtttctagctctg

SEQ ID NO: 870 - DNA, 20 bp, Artificial Sequence
  Synthetic sequence
catccgggtttctagctctg

SEQ ID NO: 871 - DNA, 20 bp, Artificial Sequence
  Synthetic sequence
catccgggtttctagctctg

SEQ ID NO: 872 - DNA, 18 bp, Artificial Sequence
  Synthetic sequence
catccgggtttctagctc

SEQ ID NO: 873 - DNA, 18 bp, Artificial Sequence
  Synthetic sequence
catccgggtttctagctc

SEQ ID NO: 874 - DNA, 18 bp, Artificial Sequence
  Synthetic sequence
catccgggtttctagctc

SEQ ID NO: 875 - DNA, 18 bp, Artificial Sequence
  Synthetic sequence
catccgggtttctagctc

SEQ ID NO: 876 - DNA, 18 bp, Artificial Sequence
  Synthetic sequence
tccgggtttctagctctg

SEQ ID NO: 877 - DNA, 18 bp, Artificial Sequence
  Synthetic sequence
tccgggtttctagctctg

SEQ ID NO: 878 - DNA, 18 bp, Artificial Sequence
  Synthetic sequence
tccgggtttctagctctg

SEQ ID NO: 879 - DNA, 18 bp, Artificial Sequence
  Synthetic sequence
tccgggtttctagctctg

SEQ ID NO: 880 - DNA, 20 bp, Artificial Sequence
  Synthetic sequence
catccgggtttctagctctg

SEQ ID NO: 881 - DNA, 20 bp, Artificial Sequence
  Synthetic sequence
catccgggtttctagctctg

SEQ ID NO: 882 - DNA, 20 bp, Artificial Sequence
  Synthetic sequence
catccgggtttctagctctg

SEQ ID NO: 883 - DNA, 20 bp, Artificial Sequence
  Synthetic sequence
catccgggtttctagctctg

SEQ ID NO: 884 - DNA, 20 bp, Artificial Sequence
  Synthetic sequence
catccgggtttctagctctg

SEQ ID NO: 885 - DNA, 20 bp, Artificial Sequence
  Synthetic sequence
catccgggtttctagctctg

SEQ ID NO: 886 - DNA, 19 bp, Artificial Sequence
  Synthetic sequence
catccgggtttctagctct

SEQ ID NO: 887 - DNA, 19 bp, Artificial Sequence
  Synthetic sequence
catccgggtttctagctct

SEQ ID NO: 888 - DNA, 19 bp, Artificial Sequence
  Synthetic sequence
catccgggtttctagctct

SEQ ID NO: 889 - DNA, 19 bp, Artificial Sequence
  Synthetic sequence
atccgggtttctagctctg

SEQ ID NO: 890 - DNA, 19 bp, Artificial Sequence
  Synthetic sequence
atccgggtttctagctctg

SEQ ID NO: 891 - DNA, 19 bp, Artificial Sequence
  Synthetic sequence
atccgggtttctagctctg

SEQ ID NO: 892 - DNA, 18 bp, Artificial Sequence
  Synthetic sequence
catccgggtttctagctc

SEQ ID NO: 893 - DNA, 18 bp, Artificial Sequence
  Synthetic sequence
catccgggtttctagctc

SEQ ID NO: 894 - DNA, 18 bp, Artificial Sequence
  Synthetic sequence
catccgggtttctagctc

SEQ ID NO: 895 - DNA, 18 bp, Artificial Sequence
  Synthetic sequence
tccgggtttctagctctg

SEQ ID NO: 896 - DNA, 18 bp, Artificial Sequence
  Synthetic sequence
tccgggtttctagctctg

SEQ ID NO: 897 - DNA, 18 bp, Artificial Sequence
  Synthetic sequence
tccgggtttctagctctg

SEQ ID NO: 898 - DNA, 17 bp, Artificial Sequence
  Synthetic sequence
catccgggtttctagct

SEQ ID NO: 899 - DNA, 17 bp, Artificial Sequence
  Synthetic sequence
catccgggtttctagct

SEQ ID NO: 900 - DNA, 17 bp, Artificial Sequence
  Synthetic sequence
catccgggtttctagct

SEQ ID NO: 901 - DNA, 17 bp, Artificial Sequence
  Synthetic sequence
ccgggtttctagctctg

SEQ ID NO: 902 - DNA, 17 bp, Artificial Sequence
  Synthetic sequence
ccgggtttctagctctg

SEQ ID NO: 903 - DNA, 17 bp, Artificial Sequence
  Synthetic sequence
ccgggtttctagctctg

SEQ ID NO: 904 - DNA, 19 bp, Artificial Sequence
  Synthetic sequence
atccgggtttctagctctg

SEQ ID NO: 905 - DNA, 19 bp, Artificial Sequence
  Synthetic sequence
atccgggtttctagctctg

SEQ ID NO: 906 - DNA, 19 bp, Artificial Sequence
  Synthetic sequence
catccgggtttctagctct

SEQ ID NO: 907 - DNA, 19 bp, Artificial Sequence
  Synthetic sequence
catccgggtttctagctct

SEQ ID NO: 908 - DNA, 18 bp, Artificial Sequence
  Synthetic sequence
atccgggtttctagctct

SEQ ID NO: 909 - DNA, 18 bp, Artificial Sequence
  Synthetic sequence
atccgggtttctagctct

SEQ ID NO: 910 - DNA, 18 bp, Artificial Sequence
  Synthetic sequence
atccgggtttctagctct

SEQ ID NO: 911 - DNA, 18 bp, Artificial Sequence
  Synthetic sequence
atccgggtttctagctct

SEQ ID NO: 912 - DNA, 17 bp, Artificial Sequence
  Synthetic sequence
atccgggtttctagctc

SEQ ID NO: 913 - DNA, 17 bp, Artificial Sequence
  Synthetic sequence
atccgggtttctagctc

SEQ ID NO: 914 - DNA, 17 bp, Artificial Sequence
  Synthetic sequence
atccgggtttctagctc

SEQ ID NO: 915 - DNA, 20 bp, Artificial Sequence
  Synthetic sequence
catccgggtttctagctctg

SEQ ID NO: 916 - DNA, 20 bp, Artificial Sequence
  Synthetic sequence
catccgggtttctagctctg

SEQ ID NO: 917 - DNA, 20 bp, Artificial Sequence
  Synthetic sequence
catccgggtttctagctctg

SEQ ID NO: 918 - DNA, 20 bp, Artificial Sequence
  Synthetic sequence
catccgggtttctagctctg

SEQ ID NO: 919 - DNA, 19 bp, Artificial Sequence
  Synthetic sequence
catccgggtttctagctct

SEQ ID NO: 920 - DNA, 19 bp, Artificial Sequence
  Synthetic sequence
atccgggtttctagctctg

SEQ ID NO: 921 - DNA, 20 bp, Artificial Sequence
  Synthetic sequence
catccgggtttctagctctg

SEQ ID NO: 922 - DNA, 20 bp, Artificial Sequence
  Synthetic sequence
catccgggtttctagctctg

SEQ ID NO: 923 - DNA, 19 bp, Artificial Sequence
  Synthetic sequence
catccgggtttctagctct

SEQ ID NO: 924 - DNA, 20 bp, Artificial Sequence
  Synthetic sequence
catccgggtttctagctctg

SEQ ID NO: 925 - DNA, 18 bp, Artificial Sequence
  Synthetic sequence
catccgggtttctagctc

SEQ ID NO: 926 - DNA, 18 bp, Artificial Sequence
  Synthetic sequence
tccgggtttctagctctg

SEQ ID NO: 927 - DNA, 20 bp, Artificial Sequence
  Synthetic sequence
catccgggtttctagctctg

SEQ ID NO: 928 - DNA, 19 bp, Artificial Sequence
  Synthetic sequence
catccgggtttctagctct

SEQ ID NO: 929 - DNA, 18 bp, Artificial Sequence
  Synthetic sequence
catccgggtttctagctc

SEQ ID NO: 930 - DNA, 18 bp, Artificial Sequence
  Synthetic sequence
tccgggtttctagctctg

SEQ ID NO: 931 - DNA, 17 bp, Artificial Sequence
  Synthetic sequence
catccgggtttctagct

SEQ ID NO: 932 - DNA, 17 bp, Artificial Sequence
  Synthetic sequence
ccgggtttctagctctg

SEQ ID NO: 933 - DNA, 19 bp, Artificial Sequence
  Synthetic sequence
atccgggtttctagctctg

SEQ ID NO: 934 - DNA, 18 bp, Artificial Sequence
  Synthetic sequence
atccgggtttctagctct

SEQ ID NO: 935 - DNA, 17 bp, Artificial Sequence
  Synthetic sequence
atccgggtttctagctc

SEQ ID NO: 936 - DNA, 20 bp, Artificial Sequence
  Synthetic sequence
catccgggtttctagctctg

SEQ ID NO: 937 - DNA, 20 bp, Artificial Sequence
  Synthetic sequence
catccgggtttctagctctg

SEQ ID NO: 938 - DNA, 20 bp, Artificial Sequence
  Synthetic sequence
catccgggtttctagctctg

SEQ ID NO: 939 - DNA, 20 bp, Artificial Sequence
  Synthetic sequence
catccgggtttctagctctg

SEQ ID NO: 940 - DNA, 20 bp, Artificial Sequence
  Synthetic sequence
catccgggtttctagctctg

SEQ ID NO: 941 - DNA, 20 bp, Artificial Sequence
  Synthetic sequence
catccgggtttctagctctg

SEQ ID NO: 942 - DNA, 20 bp, Artificial Sequence
  Synthetic sequence
catccgggtttctagctctg

SEQ ID NO: 943 - DNA, 20 bp, Artificial Sequence
  Synthetic sequence
catccgggtttctagctctg

SEQ ID NO: 944 - DNA, 20 bp, Artificial Sequence
  Synthetic sequence
catccgggtttctagctctg

SEQ ID NO: 945 - DNA, 20 bp, Artificial Sequence
  Synthetic sequence
catccgggtttctagctctg

SEQ ID NO: 946 - DNA, 20 bp, Artificial Sequence
  Synthetic sequence
catccgggtttctagctctg

SEQ ID NO: 947 - DNA, 20 bp, Artificial Sequence
  Synthetic sequence
catccgggtttctagctctg

SEQ ID NO: 948 - DNA, 20 bp, Artificial Sequence
  Synthetic sequence
catccgggtttctagctctg

SEQ ID NO: 949 - DNA, 20 bp, Artificial Sequence
  Synthetic sequence
catccgggtttctagctctg

SEQ ID NO: 950 - DNA, 20 bp, Artificial Sequence
  Synthetic sequence
catccgggtttctagctctg

SEQ ID NO: 951 - DNA, 21 bp, Artificial Sequence
  Synthetic sequence
catccgggtttctagctctga

SEQ ID NO: 952 - DNA, 21 bp, Artificial Sequence
  Synthetic sequence
catccgggtttctagctctga

SEQ ID NO: 953 - DNA, 21 bp, Artificial Sequence
  Synthetic sequence
catccgggtttctagctctga

SEQ ID NO: 954 - DNA, 21 bp, Artificial Sequence
  Synthetic sequence
catccgggtttctagctctga

SEQ ID NO: 955 - DNA, 21 bp, Artificial Sequence
  Synthetic sequence
catccgggtttctagctctga

SEQ ID NO: 956 - DNA, 21 bp, Artificial Sequence
  Synthetic sequence
catccgggtttctagctctga

SEQ ID NO: 957 - DNA, 21 bp, Artificial Sequence
  Synthetic sequence
catccgggtttctagctctga

SEQ ID NO: 958 - DNA, 21 bp, Artificial Sequence
  Synthetic sequence
catccgggtttctagctctga

SEQ ID NO: 959 - DNA, 21 bp, Artificial Sequence
  Synthetic sequence
catccgggtttctagctctga

SEQ ID NO: 960 - DNA, 21 bp, Artificial Sequence
  Synthetic sequence
catccgggtttctagctctga

SEQ ID NO: 961 - DNA, 21 bp, Artificial Sequence
  Synthetic sequence
catccgggtttctagctctga

SEQ ID NO: 962 - DNA, 21 bp, Artificial Sequence
  Synthetic sequence
catccgggtttctagctctga

SEQ ID NO: 963 - DNA, 21 bp, Artificial Sequence
  Synthetic sequence
catccgggtttctagctctga

SEQ ID NO: 964 - DNA, 21 bp, Artificial Sequence
  Synthetic sequence
catccgggtttctagctctga

SEQ ID NO: 965 - DNA, 21 bp, Artificial Sequence
  Synthetic sequence
catccgggtttctagctctga

SEQ ID NO: 966 - DNA, 21 bp, Artificial Sequence
  Synthetic sequence
catccgggtttctagctctga

SEQ ID NO: 967 - DNA, 22 bp, Artificial Sequence
  Synthetic sequence
catccgggtttctagctctgaa

SEQ ID NO: 968 - DNA, 22 bp, Artificial Sequence
  Synthetic sequence
catccgggtttctagctctgaa

SEQ ID NO: 969 - DNA, 22 bp, Artificial Sequence
  Synthetic sequence
catccgggtttctagctctgaa

SEQ ID NO: 970 - DNA, 22 bp, Artificial Sequence
  Synthetic sequence
catccgggtttctagctctgaa

SEQ ID NO: 971 - DNA, 22 bp, Artificial Sequence
  Synthetic sequence
catccgggtttctagctctgaa

SEQ ID NO: 972 - DNA, 22 bp, Artificial Sequence
  Synthetic sequence
catccgggtttctagctctgaa

SEQ ID NO: 973 - DNA, 22 bp, Artificial Sequence
  Synthetic sequence
catccgggtttctagctctgaa

SEQ ID NO: 974 - DNA, 22 bp, Artificial Sequence
  Synthetic sequence
catccgggtttctagctctgaa

SEQ ID NO: 975 - DNA, 22 bp, Artificial Sequence
  Synthetic sequence
catccgggtttctagctctgaa

SEQ ID NO: 976 - DNA, 22 bp, Artificial Sequence
  Synthetic sequence
catccgggtttctagctctgaa

SEQ ID NO: 977 - DNA, 22 bp, Artificial Sequence
  Synthetic sequence
catccgggtttctagctctgaa

SEQ ID NO: 978 - DNA, 22 bp, Artificial Sequence
  Synthetic sequence
catccgggtttctagctctgaa

SEQ ID NO: 979 - DNA, 22 bp, Artificial Sequence
  Synthetic sequence
catccgggtttctagctctgaa

SEQ ID NO: 980 - DNA, 22 bp, Artificial Sequence
  Synthetic sequence
catccgggtttctagctctgaa

SEQ ID NO: 981 - DNA, 22 bp, Artificial Sequence
  Synthetic sequence
catccgggtttctagctctgaa

SEQ ID NO: 982 - DNA, 22 bp, Artificial Sequence
  Synthetic sequence
catccgggtttctagctctgaa

SEQ ID NO: 983 - DNA, 23 bp, Artificial Sequence
  Synthetic sequence
catccgggtttctagctctgaac

SEQ ID NO: 984 - DNA, 23 bp, Artificial Sequence
  Synthetic sequence
catccgggtttctagctctgaac

SEQ ID NO: 985 - DNA, 23 bp, Artificial Sequence
  Synthetic sequence
catccgggtttctagctctgaac

SEQ ID NO: 986 - DNA, 23 bp, Artificial Sequence
  Synthetic sequence
catccgggtttctagctctgaac

SEQ ID NO: 987 - DNA, 23 bp, Artificial Sequence
  Synthetic sequence
catccgggtttctagctctgaac

SEQ ID NO: 988 - DNA, 23 bp, Artificial Sequence
  Synthetic sequence
catccgggtttctagctctgaac

SEQ ID NO: 989 - DNA, 23 bp, Artificial Sequence
  Synthetic sequence
catccgggtttctagctctgaac

SEQ ID NO: 990 - DNA, 23 bp, Artificial Sequence
  Synthetic sequence
catccgggtttctagctctgaac

SEQ ID NO: 991 - DNA, 23 bp, Artificial Sequence
  Synthetic sequence
catccgggtttctagctctgaac

SEQ ID NO: 992 - DNA, 23 bp, Artificial Sequence
  Synthetic sequence
catccgggtttctagctctgaac

SEQ ID NO: 993 - DNA, 23 bp, Artificial Sequence
  Synthetic sequence
catccgggtttctagctctgaac

SEQ ID NO: 994 - DNA, 23 bp, Artificial Sequence
  Synthetic sequence
catccgggtttctagctctgaac

SEQ ID NO: 995 - DNA, 23 bp, Artificial Sequence
  Synthetic sequence
catccgggtttctagctctgaac

SEQ ID NO: 996 - DNA, 23 bp, Artificial Sequence
  Synthetic sequence
catccgggtttctagctctgaac

SEQ ID NO: 997 - DNA, 23 bp, Artificial Sequence
  Synthetic sequence
catccgggtttctagctctgaac

SEQ ID NO: 998 - DNA, 23 bp, Artificial Sequence
  Synthetic sequence
catccgggtttctagctctgaac

SEQ ID NO: 999 - DNA, 21 bp, Artificial Sequence
  Synthetic sequence
catccgggtttctagctctga

SEQ ID NO: 1000 - DNA, 21 bp, Artificial Sequence
  Synthetic sequence
catccgggtttctagctctga

SEQ ID NO: 1001 - DNA, 21 bp, Artificial Sequence
  Synthetic sequence
catccgggtttctagctctga

SEQ ID NO: 1002 - DNA, 21 bp, Artificial Sequence
  Synthetic sequence
catccgggtttctagctctga

SEQ ID NO: 1003 - DNA, 21 bp, Artificial Sequence
  Synthetic sequence
catccgggtttctagctctga

SEQ ID NO: 1004 - DNA, 21 bp, Artificial Sequence
  Synthetic sequence
catccgggtttctagctctga

SEQ ID NO: 1005 - DNA, 21 bp, Artificial Sequence
  Synthetic sequence
catccgggtttctagctctga

SEQ ID NO: 1006 - DNA, 21 bp, Artificial Sequence
  Synthetic sequence
catccgggtttctagctctga

SEQ ID NO: 1007 - DNA, 21 bp, Artificial Sequence
  Synthetic sequence
catccgggtttctagctctga

SEQ ID NO: 1008 - DNA, 21 bp, Artificial Sequence
  Synthetic sequence
catccgggtttctagctctga

SEQ ID NO: 1009 - DNA, 21 bp, Artificial Sequence
  Synthetic sequence
catccgggtttctagctctga

SEQ ID NO: 1010 - DNA, 21 bp, Artificial Sequence
  Synthetic sequence
catccgggtttctagctctga

SEQ ID NO: 1011 - DNA, 21 bp, Artificial Sequence
  Synthetic sequence
catccgggtttctagctctga

SEQ ID NO: 1012 - DNA, 21 bp, Artificial Sequence
  Synthetic sequence
catccgggtttctagctctga

SEQ ID NO: 1013 - DNA, 21 bp, Artificial Sequence
  Synthetic sequence
catccgggtttctagctctga

SEQ ID NO: 1014 - DNA, 21 bp, Artificial Sequence
  Synthetic sequence
catccgggtttctagctctga

SEQ ID NO: 1015 - DNA, 22 bp, Artificial Sequence
  Synthetic sequence
catccgggtttctagctctgaa

SEQ ID NO: 1016 - DNA, 22 bp, Artificial Sequence
  Synthetic sequence
catccgggtttctagctctgaa

SEQ ID NO: 1017 - DNA, 22 bp, Artificial Sequence
  Synthetic sequence
catccgggtttctagctctgaa

SEQ ID NO: 1018 - DNA, 22 bp, Artificial Sequence
  Synthetic sequence
catccgggtttctagctctgaa

SEQ ID NO: 1019 - DNA, 22 bp, Artificial Sequence
  Synthetic sequence
catccgggtttctagctctgaa

SEQ ID NO: 1020 - DNA, 22 bp, Artificial Sequence
  Synthetic sequence
catccgggtttctagctctgaa

SEQ ID NO: 1021 - DNA, 22 bp, Artificial Sequence
  Synthetic sequence
catccgggtttctagctctgaa

SEQ ID NO: 1022 - DNA, 22 bp, Artificial Sequence
  Synthetic sequence
catccgggtttctagctctgaa

SEQ ID NO: 1023 - DNA, 22 bp, Artificial Sequence
  Synthetic sequence
catccgggtttctagctctgaa

SEQ ID NO: 1024 - DNA, 22 bp, Artificial Sequence
  Synthetic sequence
catccgggtttctagctctgaa

SEQ ID NO: 1025 - DNA, 22 bp, Artificial Sequence
  Synthetic sequence
catccgggtttctagctctgaa

SEQ ID NO: 1026 - DNA, 22 bp, Artificial Sequence
  Synthetic sequence
catccgggtttctagctctgaa

SEQ ID NO: 1027 - DNA, 22 bp, Artificial Sequence
  Synthetic sequence
catccgggtttctagctctgaa

SEQ ID NO: 1028 - DNA, 22 bp, Artificial Sequence
  Synthetic sequence
catccgggtttctagctctgaa

SEQ ID NO: 1029 - DNA, 22 bp, Artificial Sequence
  Synthetic sequence
catccgggtttctagctctgaa

SEQ ID NO: 1030 - DNA, 22 bp, Artificial Sequence
  Synthetic sequence
catccgggtttctagctctgaa

SEQ ID NO: 1031 - DNA, 20 bp, Artificial Sequence
  Synthetic sequence
tggcagcttgttcattgagt

SEQ ID NO: 1032 - DNA, 20 bp, Artificial Sequence
  Synthetic sequence
tggcagcttgttcattgagt

SEQ ID NO: 1033 - DNA, 20 bp, Artificial Sequence
  Synthetic sequence
tggcagcttgttcattgagt

SEQ ID NO: 1034 - DNA, 20 bp, Artificial Sequence
  Synthetic sequence
tggcagcttgttcattgagt

SEQ ID NO: 1035 - DNA, 20 bp, Artificial Sequence
  Synthetic sequence
tggcagcttgttcattgagt

SEQ ID NO: 1036 - DNA, 20 bp, Artificial Sequence
  Synthetic sequence
tggcagcttgttcattgagt

SEQ ID NO: 1037 - DNA, 20 bp, Artificial Sequence
  Synthetic sequence
tggcagcttgttcattgagt

SEQ ID NO: 1038 - DNA, 20 bp, Artificial Sequence
  Synthetic sequence
tggcagcttgttcattgagt

SEQ ID NO: 1039 - DNA, 20 bp, Artificial Sequence
  Synthetic sequence
tggcagcttgttcattgagt

SEQ ID NO: 1040 - DNA, 20 bp, Artificial Sequence
  Synthetic sequence
tggcagcttgttcattgagt

SEQ ID NO: 1041 - DNA, 20 bp, Artificial Sequence
  Synthetic sequence
tggcagcttgttcattgagt

SEQ ID NO: 1042 - DNA, 20 bp, Artificial Sequence
  Synthetic sequence
tggcagcttgttcattgagt

SEQ ID NO: 1043 - DNA, 20 bp, Artificial Sequence
  Synthetic sequence
tggcagcttgttcattgagt

SEQ ID NO: 1044 - DNA, 20 bp, Artificial Sequence
  Synthetic sequence
tggcagcttgttcattgagt

SEQ ID NO: 1045 - DNA, 20 bp, Artificial Sequence
  Synthetic sequence
tggcagcttgttcattgagt

SEQ ID NO: 1046 - DNA, 20 bp, Artificial Sequence
  Synthetic sequence
tggcagcttgttcattgagt

SEQ ID NO: 1047 - DNA, 20 bp, Artificial Sequence
  Synthetic sequence
tggcagcttgttcattgagt

SEQ ID NO: 1048 - DNA, 20 bp, Artificial Sequence
  Synthetic sequence
tggcagcttgttcattgagt

SEQ ID NO: 1049 - DNA, 20 bp, Artificial Sequence
  Synthetic sequence
tggcagcttgttcattgagt

SEQ ID NO: 1050 - DNA, 20 bp, Artificial Sequence
  Synthetic sequence
tggcagcttgttcattgagt

SEQ ID NO: 1051 - DNA, 20 bp, Artificial Sequence
  Synthetic sequence
tggcagcttgttcattgagt

SEQ ID NO: 1052 - DNA, 20 bp, Artificial Sequence
  Synthetic sequence
tggcagcttgttcattgagt

SEQ ID NO: 1053 - DNA, 19 bp, Artificial Sequence
  Synthetic sequence
tggcagcttgttcattgag

SEQ ID NO: 1054 - DNA, 19 bp, Artificial Sequence
  Synthetic sequence
tggcagcttgttcattgag

SEQ ID NO: 1055 - DNA, 19 bp, Artificial Sequence
  Synthetic sequence
tggcagcttgttcattgag

SEQ ID NO: 1056 - DNA, 19 bp, Artificial Sequence
  Synthetic sequence
tggcagcttgttcattgag

SEQ ID NO: 1057 - DNA, 19 bp, Artificial Sequence
  Synthetic sequence
tggcagcttgttcattgag

SEQ ID NO: 1058 - DNA, 19 bp, Artificial Sequence
  Synthetic sequence
ggcagcttgttcattgagt

SEQ ID NO: 1059 - DNA, 19 bp, Artificial Sequence
  Synthetic sequence
ggcagcttgttcattgagt

SEQ ID NO: 1060 - DNA, 19 bp, Artificial Sequence
  Synthetic sequence
ggcagcttgttcattgagt

SEQ ID NO: 1061 - DNA, 19 bp, Artificial Sequence
  Synthetic sequence
ggcagcttgttcattgagt

SEQ ID NO: 1062 - DNA, 19 bp, Artificial Sequence
  Synthetic sequence
ggcagcttgttcattgagt

SEQ ID NO: 1063 - DNA, 20 bp, Artificial Sequence
  Synthetic sequence
tggcagcttgttcattgagt

SEQ ID NO: 1064 - DNA, 20 bp, Artificial Sequence
  Synthetic sequence
tggcagcttgttcattgagt

SEQ ID NO: 1065 - DNA, 20 bp, Artificial Sequence
  Synthetic sequence
tggcagcttgttcattgagt

SEQ ID NO: 1066 - DNA, 20 bp, Artificial Sequence
  Synthetic sequence
tggcagcttgttcattgagt

SEQ ID NO: 1067 - DNA, 20 bp, Artificial Sequence
  Synthetic sequence
tggcagcttgttcattgagt

SEQ ID NO: 1068 - DNA, 20 bp, Artificial Sequence
  Synthetic sequence
tggcagcttgttcattgagt

SEQ ID NO: 1069 - DNA, 20 bp, Artificial Sequence
  Synthetic sequence
tggcagcttgttcattgagt

SEQ ID NO: 1070 - DNA, 20 bp, Artificial Sequence
  Synthetic sequence
tggcagcttgttcattgagt

SEQ ID NO: 1071 - DNA, 19 bp, Artificial Sequence
  Synthetic sequence
tggcagcttgttcattgag

SEQ ID NO: 1072 - DNA, 19 bp, Artificial Sequence
  Synthetic sequence
tggcagcttgttcattgag

SEQ ID NO: 1073 - DNA, 19 bp, Artificial Sequence
  Synthetic sequence
tggcagcttgttcattgag

SEQ ID NO: 1074 - DNA, 19 bp, Artificial Sequence
  Synthetic sequence
tggcagcttgttcattgag

SEQ ID NO: 1075 - DNA, 20 bp, Artificial Sequence
  Synthetic sequence
tggcagcttgttcattgagt

SEQ ID NO: 1076 - DNA, 20 bp, Artificial Sequence
  Synthetic sequence
tggcagcttgttcattgagt

SEQ ID NO: 1077 - DNA, 20 bp, Artificial Sequence
  Synthetic sequence
tggcagcttgttcattgagt

SEQ ID NO: 1078 - DNA, 18 bp, Artificial Sequence
  Synthetic sequence
tggcagcttgttcattga

SEQ ID NO: 1079 - DNA, 18 bp, Artificial Sequence
  Synthetic sequence
tggcagcttgttcattga

SEQ ID NO: 1080 - DNA, 18 bp, Artificial Sequence
  Synthetic sequence
tggcagcttgttcattga

SEQ ID NO: 1081 - DNA, 18 bp, Artificial Sequence
  Synthetic sequence
tggcagcttgttcattga

SEQ ID NO: 1082 - DNA, 18 bp, Artificial Sequence
  Synthetic sequence
gcagcttgttcattgagt

SEQ ID NO: 1083 - DNA, 18 bp, Artificial Sequence
  Synthetic sequence
gcagcttgttcattgagt

SEQ ID NO: 1084 - DNA, 18 bp, Artificial Sequence
  Synthetic sequence
gcagcttgttcattgagt

SEQ ID NO: 1085 - DNA, 18 bp, Artificial Sequence
  Synthetic sequence
gcagcttgttcattgagt

SEQ ID NO: 1086 - DNA, 20 bp, Artificial Sequence
  Synthetic sequence
tggcagcttgttcattgagt

SEQ ID NO: 1087 - DNA, 20 bp, Artificial Sequence
  Synthetic sequence
tggcagcttgttcattgagt

SEQ ID NO: 1088 - DNA, 20 bp, Artificial Sequence
  Synthetic sequence
tggcagcttgttcattgagt

SEQ ID NO: 1089 - DNA, 20 bp, Artificial Sequence
  Synthetic sequence
tggcagcttgttcattgagt

SEQ ID NO: 1090 - DNA, 20 bp, Artificial Sequence
  Synthetic sequence
tggcagcttgttcattgagt

SEQ ID NO: 1091 - DNA, 20 bp, Artificial Sequence
  Synthetic sequence
tggcagcttgttcattgagt

SEQ ID NO: 1092 - DNA, 19 bp, Artificial Sequence
  Synthetic sequence
tggcagcttgttcattgag

SEQ ID NO: 1093 - DNA, 19 bp, Artificial Sequence
  Synthetic sequence
tggcagcttgttcattgag

SEQ ID NO: 1094 - DNA, 19 bp, Artificial Sequence
  Synthetic sequence
tggcagcttgttcattgag

SEQ ID NO: 1095 - DNA, 19 bp, Artificial Sequence
  Synthetic sequence
ggcagcttgttcattgagt

SEQ ID NO: 1096 - DNA, 19 bp, Artificial Sequence
  Synthetic sequence
ggcagcttgttcattgagt

SEQ ID NO: 1097 - DNA, 19 bp, Artificial Sequence
  Synthetic sequence
ggcagcttgttcattgagt

SEQ ID NO: 1098 - DNA, 18 bp, Artificial Sequence
  Synthetic sequence
tggcagcttgttcattga

SEQ ID NO: 1099 - DNA, 18 bp, Artificial Sequence
  Synthetic sequence
tggcagcttgttcattga

SEQ ID NO: 1100 - DNA, 18 bp, Artificial Sequence
  Synthetic sequence
tggcagcttgttcattga

SEQ ID NO: 1101 - DNA, 18 bp, Artificial Sequence
  Synthetic sequence
gcagcttgttcattgagt

SEQ ID NO: 1102 - DNA, 18 bp, Artificial Sequence
  Synthetic sequence
gcagcttgttcattgagt

SEQ ID NO: 1103 - DNA, 18 bp, Artificial Sequence
  Synthetic sequence
gcagcttgttcattgagt

SEQ ID NO: 1104 - DNA, 17 bp, Artificial Sequence
  Synthetic sequence
tggcagcttgttcattg

SEQ ID NO: 1105 - DNA, 17 bp, Artificial Sequence
  Synthetic sequence
tggcagcttgttcattg

SEQ ID NO: 1106 - DNA, 17 bp, Artificial Sequence
  Synthetic sequence
tggcagcttgttcattg

SEQ ID NO: 1107 - DNA, 17 bp, Artificial Sequence
  Synthetic sequence
cagcttgttcattgagt

SEQ ID NO: 1108 - DNA, 17 bp, Artificial Sequence
  Synthetic sequence
cagcttgttcattgagt

SEQ ID NO: 1109 - DNA, 17 bp, Artificial Sequence
  Synthetic sequence
cagcttgttcattgagt

SEQ ID NO: 1110 - DNA, 19 bp, Artificial Sequence
  Synthetic sequence
ggcagcttgttcattgagt

SEQ ID NO: 1111 - DNA, 19 bp, Artificial Sequence
  Synthetic sequence
ggcagcttgttcattgagt

SEQ ID NO: 1112 - DNA, 19 bp, Artificial Sequence
  Synthetic sequence
tggcagcttgttcattgag

SEQ ID NO: 1113 - DNA, 19 bp, Artificial Sequence
  Synthetic sequence
tggcagcttgttcattgag

SEQ ID NO: 1114 - DNA, 18 bp, Artificial Sequence
  Synthetic sequence
ggcagcttgttcattgag

SEQ ID NO: 1115 - DNA, 18 bp, Artificial Sequence
  Synthetic sequence
ggcagcttgttcattgag

SEQ ID NO: 1116 - DNA, 18 bp, Artificial Sequence
  Synthetic sequence
ggcagcttgttcattgag

SEQ ID NO: 1117 - DNA, 18 bp, Artificial Sequence
  Synthetic sequence
ggcagcttgttcattgag

SEQ ID NO: 1118 - DNA, 17 bp, Artificial Sequence
  Synthetic sequence
ggcagcttgttcattga

SEQ ID NO: 1119 - DNA, 17 bp, Artificial Sequence
  Synthetic sequence
ggcagcttgttcattga

SEQ ID NO: 1120 - DNA, 17 bp, Artificial Sequence
  Synthetic sequence
ggcagcttgttcattga

SEQ ID NO: 1121 - DNA, 20 bp, Artificial Sequence
  Synthetic sequence
tggcagcttgttcattgagt

SEQ ID NO: 1122 - DNA, 20 bp, Artificial Sequence
  Synthetic sequence
tggcagcttgttcattgagt

SEQ ID NO: 1123 - DNA, 20 bp, Artificial Sequence
  Synthetic sequence
tggcagcttgttcattgagt

SEQ ID NO: 1124 - DNA, 20 bp, Artificial Sequence
  Synthetic sequence
tggcagcttgttcattgagt

SEQ ID NO: 1125 - DNA, 19 bp, Artificial Sequence
  Synthetic sequence
tggcagcttgttcattgag

SEQ ID NO: 1126 - DNA, 19 bp, Artificial Sequence
  Synthetic sequence
ggcagcttgttcattgagt

SEQ ID NO: 1127 - DNA, 20 bp, Artificial Sequence
  Synthetic sequence
tggcagcttgttcattgagt

SEQ ID NO: 1128 - DNA, 20 bp, Artificial Sequence
  Synthetic sequence
tggcagcttgttcattgagt

SEQ ID NO: 1129 - DNA, 19 bp, Artificial Sequence
  Synthetic sequence
tggcagcttgttcattgag

SEQ ID NO: 1130 - DNA, 20 bp, Artificial Sequence
  Synthetic sequence
tggcagcttgttcattgagt

SEQ ID NO: 1131 - DNA, 18 bp, Artificial Sequence
  Synthetic sequence
tggcagcttgttcattga

SEQ ID NO: 1132 - DNA, 18 bp, Artificial Sequence
  Synthetic sequence
gcagcttgttcattgagt

SEQ ID NO: 1133 - DNA, 20 bp, Artificial Sequence
  Synthetic sequence
tggcagcttgttcattgagt

SEQ ID NO: 1134 - DNA, 19 bp, Artificial Sequence
  Synthetic sequence
tggcagcttgttcattgag

SEQ ID NO: 1135 - DNA, 18 bp, Artificial Sequence
  Synthetic sequence
tggcagcttgttcattga

SEQ ID NO: 1136 - DNA, 18 bp, Artificial Sequence
  Synthetic sequence
gcagcttgttcattgagt

SEQ ID NO: 1137 - DNA, 17 bp, Artificial Sequence
  Synthetic sequence
tggcagcttgttcattg

SEQ ID NO: 1138 - DNA, 17 bp, Artificial Sequence
  Synthetic sequence
cagcttgttcattgagt

SEQ ID NO: 1139 - DNA, 19 bp, Artificial Sequence
  Synthetic sequence
ggcagcttgttcattgagt

SEQ ID NO: 1140 - DNA, 18 bp, Artificial Sequence
  Synthetic sequence
ggcagcttgttcattgag

SEQ ID NO: 1141 - DNA, 17 bp, Artificial Sequence
  Synthetic sequence
ggcagcttgttcattga

SEQ ID NO: 1142 - DNA, 20 bp, Artificial Sequence
  Synthetic sequence
tggcagcttgttcattgagt

SEQ ID NO: 1143 - DNA, 20 bp, Artificial Sequence
  Synthetic sequence
tggcagcttgttcattgagt

SEQ ID NO: 1144 - DNA, 20 bp, Artificial Sequence
  Synthetic sequence
tggcagcttgttcattgagt

SEQ ID NO: 1145 - DNA, 20 bp, Artificial Sequence
  Synthetic sequence
tggcagcttgttcattgagt

SEQ ID NO: 1146 - DNA, 20 bp, Artificial Sequence
  Synthetic sequence
tggcagcttgttcattgagt

SEQ ID NO: 1147 - DNA, 20 bp, Artificial Sequence
  Synthetic sequence
tggcagcttgttcattgagt

SEQ ID NO: 1148 - DNA, 20 bp, Artificial Sequence
  Synthetic sequence
tggcagcttgttcattgagt

SEQ ID NO: 1149 - DNA, 20 bp, Artificial Sequence
  Synthetic sequence
tggcagcttgttcattgagt

SEQ ID NO: 1150 - DNA, 20 bp, Artificial Sequence
  Synthetic sequence
tggcagcttgttcattgagt

SEQ ID NO: 1151 - DNA, 20 bp, Artificial Sequence
  Synthetic sequence
tggcagcttgttcattgagt

SEQ ID NO: 1152 - DNA, 20 bp, Artificial Sequence
  Synthetic sequence
tggcagcttgttcattgagt

SEQ ID NO: 1153 - DNA, 20 bp, Artificial Sequence
  Synthetic sequence
tggcagcttgttcattgagt

SEQ ID NO: 1154 - DNA, 20 bp, Artificial Sequence
  Synthetic sequence
tggcagcttgttcattgagt

SEQ ID NO: 1155 - DNA, 20 bp, Artificial Sequence
  Synthetic sequence
tggcagcttgttcattgagt

SEQ ID NO: 1156 - DNA, 20 bp, Artificial Sequence
  Synthetic sequence
tggcagcttgttcattgagt

SEQ ID NO: 1157 - DNA, 21 bp, Artificial Sequence
  Synthetic sequence
tggcagcttgttcattgagta

SEQ ID NO: 1158 - DNA, 21 bp, Artificial Sequence
  Synthetic sequence
tggcagcttgttcattgagta

SEQ ID NO: 1159 - DNA, 21 bp, Artificial Sequence
  Synthetic sequence
tggcagcttgttcattgagta

SEQ ID NO: 1160 - DNA, 21 bp, Artificial Sequence
  Synthetic sequence
tggcagcttgttcattgagta

SEQ ID NO: 1161 - DNA, 21 bp, Artificial Sequence
  Synthetic sequence
tggcagcttgttcattgagta

SEQ ID NO: 1162 - DNA, 21 bp, Artificial Sequence
  Synthetic sequence
tggcagcttgttcattgagta

SEQ ID NO: 1163 - DNA, 21 bp, Artificial Sequence
  Synthetic sequence
tggcagcttgttcattgagta

SEQ ID NO: 1164 - DNA, 21 bp, Artificial Sequence
  Synthetic sequence
tggcagcttgttcattgagta

SEQ ID NO: 1165 - DNA, 21 bp, Artificial Sequence
  Synthetic sequence
tggcagcttgttcattgagta

SEQ ID NO: 1166 - DNA, 21 bp, Artificial Sequence
  Synthetic sequence
tggcagcttgttcattgagta

SEQ ID NO: 1167 - DNA, 21 bp, Artificial Sequence
  Synthetic sequence
tggcagcttgttcattgagta

SEQ ID NO: 1168 - DNA, 21 bp, Artificial Sequence
  Synthetic sequence
tggcagcttgttcattgagta

SEQ ID NO: 1169 - DNA, 21 bp, Artificial Sequence
  Synthetic sequence
tggcagcttgttcattgagta

SEQ ID NO: 1170 - DNA, 21 bp, Artificial Sequence
  Synthetic sequence
tggcagcttgttcattgagta

SEQ ID NO: 1171 - DNA, 21 bp, Artificial Sequence
  Synthetic sequence
tggcagcttgttcattgagta

SEQ ID NO: 1172 - DNA, 21 bp, Artificial Sequence
  Synthetic sequence
tggcagcttgttcattgagta

SEQ ID NO: 1173 - DNA, 22 bp, Artificial Sequence
  Synthetic sequence
tggcagcttgttcattgagtat

SEQ ID NO: 1174 - DNA, 22 bp, Artificial Sequence
  Synthetic sequence
tggcagcttgttcattgagtat

SEQ ID NO: 1175 - DNA, 22 bp, Artificial Sequence
  Synthetic sequence
tggcagcttgttcattgagtat

SEQ ID NO: 1176 - DNA, 22 bp, Artificial Sequence
  Synthetic sequence
tggcagcttgttcattgagtat

SEQ ID NO: 1177 - DNA, 22 bp, Artificial Sequence
  Synthetic sequence
tggcagcttgttcattgagtat

SEQ ID NO: 1178 - DNA, 22 bp, Artificial Sequence
  Synthetic sequence
tggcagcttgttcattgagtat

SEQ ID NO: 1179 - DNA, 22 bp, Artificial Sequence
  Synthetic sequence
tggcagcttgttcattgagtat

SEQ ID NO: 1180 - DNA, 22 bp, Artificial Sequence
  Synthetic sequence
tggcagcttgttcattgagtat

SEQ ID NO: 1181 - DNA, 22 bp, Artificial Sequence
  Synthetic sequence
tggcagcttgttcattgagtat

SEQ ID NO: 1182 - DNA, 22 bp, Artificial Sequence
  Synthetic sequence
tggcagcttgttcattgagtat

SEQ ID NO: 1183 - DNA, 22 bp, Artificial Sequence
  Synthetic sequence
tggcagcttgttcattgagtat

SEQ ID NO: 1184 - DNA, 22 bp, Artificial Sequence
  Synthetic sequence
tggcagcttgttcattgagtat

SEQ ID NO: 1185 - DNA, 22 bp, Artificial Sequence
  Synthetic sequence
tggcagcttgttcattgagtat

SEQ ID NO: 1186 - DNA, 22 bp, Artificial Sequence
  Synthetic sequence
tggcagcttgttcattgagtat

SEQ ID NO: 1187 - DNA, 22 bp, Artificial Sequence
  Synthetic sequence
tggcagcttgttcattgagtat

SEQ ID NO: 1188 - DNA, 22 bp, Artificial Sequence
  Synthetic sequence
tggcagcttgttcattgagtat

SEQ ID NO: 1189 - DNA, 23 bp, Artificial Sequence
  Synthetic sequence
tggcagcttgttcattgagtatc

SEQ ID NO: 1190 - DNA, 23 bp, Artificial Sequence
  Synthetic sequence
tggcagcttgttcattgagtatc

SEQ ID NO: 1191 - DNA, 23 bp, Artificial Sequence
  Synthetic sequence
tggcagcttgttcattgagtatc

SEQ ID NO: 1192 - DNA, 23 bp, Artificial Sequence
  Synthetic sequence
tggcagcttgttcattgagtatc

SEQ ID NO: 1193 - DNA, 23 bp, Artificial Sequence
  Synthetic sequence
tggcagcttgttcattgagtatc

SEQ ID NO: 1194 - DNA, 23 bp, Artificial Sequence
  Synthetic sequence
tggcagcttgttcattgagtatc

SEQ ID NO: 1195 - DNA, 23 bp, Artificial Sequence
  Synthetic sequence
tggcagcttgttcattgagtatc

SEQ ID NO: 1196 - DNA, 23 bp, Artificial Sequence
  Synthetic sequence
tggcagcttgttcattgagtatc

SEQ ID NO: 1197 - DNA, 23 bp, Artificial Sequence
  Synthetic sequence
tggcagcttgttcattgagtatc

SEQ ID NO: 1198 - DNA, 23 bp, Artificial Sequence
  Synthetic sequence
tggcagcttgttcattgagtatc

SEQ ID NO: 1199 - DNA, 23 bp, Artificial Sequence
  Synthetic sequence
tggcagcttgttcattgagtatc

SEQ ID NO: 1200 - DNA, 23 bp, Artificial Sequence
  Synthetic sequence
tggcagcttgttcattgagtatc

SEQ ID NO: 1201 - DNA, 23 bp, Artificial Sequence
  Synthetic sequence
tggcagcttgttcattgagtatc

SEQ ID NO: 1202 - DNA, 23 bp, Artificial Sequence
  Synthetic sequence
tggcagcttgttcattgagtatc

SEQ ID NO: 1203 - DNA, 23 bp, Artificial Sequence
  Synthetic sequence
tggcagcttgttcattgagtatc

SEQ ID NO: 1204 - DNA, 23 bp, Artificial Sequence
  Synthetic sequence
tggcagcttgttcattgagtatc

SEQ ID NO: 1205 - DNA, 21 bp, Artificial Sequence
  Synthetic sequence
tggcagcttgttcattgagta

SEQ ID NO: 1206 - DNA, 21 bp, Artificial Sequence
  Synthetic sequence
tggcagcttgttcattgagta

SEQ ID NO: 1207 - DNA, 21 bp, Artificial Sequence
  Synthetic sequence
tggcagcttgttcattgagta

SEQ ID NO: 1208 - DNA, 21 bp, Artificial Sequence
  Synthetic sequence
tggcagcttgttcattgagta

SEQ ID NO: 1209 - DNA, 21 bp, Artificial Sequence
  Synthetic sequence
tggcagcttgttcattgagta

SEQ ID NO: 1210 - DNA, 21 bp, Artificial Sequence
  Synthetic sequence
tggcagcttgttcattgagta

SEQ ID NO: 1211 - DNA, 21 bp, Artificial Sequence
  Synthetic sequence
tggcagcttgttcattgagta

SEQ ID NO: 1212 - DNA, 21 bp, Artificial Sequence
  Synthetic sequence
tggcagcttgttcattgagta

SEQ ID NO: 1213 - DNA, 21 bp, Artificial Sequence
  Synthetic sequence
tggcagcttgttcattgagta

SEQ ID NO: 1214 - DNA, 21 bp, Artificial Sequence
  Synthetic sequence
tggcagcttgttcattgagta

SEQ ID NO: 1215 - DNA, 21 bp, Artificial Sequence
  Synthetic sequence
tggcagcttgttcattgagta

SEQ ID NO: 1216 - DNA, 21 bp, Artificial Sequence
  Synthetic sequence
tggcagcttgttcattgagta

SEQ ID NO: 1217 - DNA, 21 bp, Artificial Sequence
  Synthetic sequence
tggcagcttgttcattgagta

SEQ ID NO: 1218 - DNA, 21 bp, Artificial Sequence
  Synthetic sequence
tggcagcttgttcattgagta

SEQ ID NO: 1219 - DNA, 21 bp, Artificial Sequence
  Synthetic sequence
tggcagcttgttcattgagta

SEQ ID NO: 1220 - DNA, 21 bp, Artificial Sequence
  Synthetic sequence
tggcagcttgttcattgagta

SEQ ID NO: 1221 - DNA, 22 bp, Artificial Sequence
  Synthetic sequence
tggcagcttgttcattgagtat

SEQ ID NO: 1222 - DNA, 22 bp, Artificial Sequence
  Synthetic sequence
tggcagcttgttcattgagtat

SEQ ID NO: 1223 - DNA, 22 bp, Artificial Sequence
  Synthetic sequence
tggcagcttgttcattgagtat

SEQ ID NO: 1224 - DNA, 22 bp, Artificial Sequence
  Synthetic sequence
tggcagcttgttcattgagtat

SEQ ID NO: 1225 - DNA, 22 bp, Artificial Sequence
  Synthetic sequence
tggcagcttgttcattgagtat

SEQ ID NO: 1226 - DNA, 22 bp, Artificial Sequence
  Synthetic sequence
tggcagcttgttcattgagtat

SEQ ID NO: 1227 - DNA, 22 bp, Artificial Sequence
  Synthetic sequence
tggcagcttgttcattgagtat

SEQ ID NO: 1228 - DNA, 22 bp, Artificial Sequence
  Synthetic sequence
tggcagcttgttcattgagtat

SEQ ID NO: 1229 - DNA, 22 bp, Artificial Sequence
  Synthetic sequence
tggcagcttgttcattgagtat

SEQ ID NO: 1230 - DNA, 22 bp, Artificial Sequence
  Synthetic sequence
tggcagcttgttcattgagtat

SEQ ID NO: 1231 - DNA, 22 bp, Artificial Sequence
  Synthetic sequence
tggcagcttgttcattgagtat

SEQ ID NO: 1232 - DNA, 22 bp, Artificial Sequence
  Synthetic sequence
tggcagcttgttcattgagtat

SEQ ID NO: 1233 - DNA, 22 bp, Artificial Sequence
  Synthetic sequence
tggcagcttgttcattgagtat

SEQ ID NO: 1234 - DNA, 22 bp, Artificial Sequence
  Synthetic sequence
tggcagcttgttcattgagtat

SEQ ID NO: 1235 - DNA, 22 bp, Artificial Sequence
  Synthetic sequence
tggcagcttgttcattgagtat

SEQ ID NO: 1236 - DNA, 22 bp, Artificial Sequence
  Synthetic sequence
tggcagcttgttcattgagtat

SEQ ID NO: 1237 - DNA, 20 bp, Artificial Sequence
  Synthetic sequence
ctttggcagcttgttcattg

SEQ ID NO: 1238 - DNA, 20 bp, Artificial Sequence
  Synthetic sequence
ctttggcagcttgttcattg

SEQ ID NO: 1239 - DNA, 20 bp, Artificial Sequence
  Synthetic sequence
ctttggcagcttgttcattg

SEQ ID NO: 1240 - DNA, 20 bp, Artificial Sequence
  Synthetic sequence
ctttggcagcttgttcattg

SEQ ID NO: 1241 - DNA, 20 bp, Artificial Sequence
  Synthetic sequence
ctttggcagcttgttcattg

SEQ ID NO: 1242 - DNA, 20 bp, Artificial Sequence
  Synthetic sequence
ctttggcagcttgttcattg

SEQ ID NO: 1243 - DNA, 20 bp, Artificial Sequence
  Synthetic sequence
ctttggcagcttgttcattg

SEQ ID NO: 1244 - DNA, 20 bp, Artificial Sequence
  Synthetic sequence
ctttggcagcttgttcattg

SEQ ID NO: 1245 - DNA, 20 bp, Artificial Sequence
  Synthetic sequence
ctttggcagcttgttcattg

SEQ ID NO: 1246 - DNA, 20 bp, Artificial Sequence
  Synthetic sequence
ctttggcagcttgttcattg

SEQ ID NO: 1247 - DNA, 20 bp, Artificial Sequence
  Synthetic sequence
ctttggcagcttgttcattg

SEQ ID NO: 1248 - DNA, 20 bp, Artificial Sequence
  Synthetic sequence
ctttggcagcttgttcattg

SEQ ID NO: 1249 - DNA, 20 bp, Artificial Sequence
  Synthetic sequence
ctttggcagcttgttcattg

SEQ ID NO: 1250 - DNA, 20 bp, Artificial Sequence
  Synthetic sequence
ctttggcagcttgttcattg

SEQ ID NO: 1251 - DNA, 20 bp, Artificial Sequence
  Synthetic sequence
ctttggcagcttgttcattg

SEQ ID NO: 1252 - DNA, 20 bp, Artificial Sequence
  Synthetic sequence
ctttggcagcttgttcattg

SEQ ID NO: 1253 - DNA, 20 bp, Artificial Sequence
  Synthetic sequence
ctttggcagcttgttcattg

SEQ ID NO: 1254 - DNA, 20 bp, Artificial Sequence
  Synthetic sequence
ctttggcagcttgttcattg

SEQ ID NO: 1255 - DNA, 20 bp, Artificial Sequence
  Synthetic sequence
ctttggcagcttgttcattg

SEQ ID NO: 1256 - DNA, 20 bp, Artificial Sequence
  Synthetic sequence
ctttggcagcttgttcattg

SEQ ID NO: 1257 - DNA, 20 bp, Artificial Sequence
  Synthetic sequence
ctttggcagcttgttcattg

SEQ ID NO: 1258 - DNA, 20 bp, Artificial Sequence
  Synthetic sequence
ctttggcagcttgttcattg

SEQ ID NO: 1259 - DNA, 19 bp, Artificial Sequence
  Synthetic sequence
ctttggcagcttgttcatt

SEQ ID NO: 1260 - DNA, 19 bp, Artificial Sequence
  Synthetic sequence
ctttggcagcttgttcatt

SEQ ID NO: 1261 - DNA, 19 bp, Artificial Sequence
  Synthetic sequence
ctttggcagcttgttcatt

SEQ ID NO: 1262 - DNA, 19 bp, Artificial Sequence
  Synthetic sequence
ctttggcagcttgttcatt

SEQ ID NO: 1263 - DNA, 19 bp, Artificial Sequence
  Synthetic sequence
ctttggcagcttgttcatt

SEQ ID NO: 1264 - DNA, 19 bp, Artificial Sequence
  Synthetic sequence
tttggcagcttgttcattg

SEQ ID NO: 1265 - DNA, 19 bp, Artificial Sequence
  Synthetic sequence
tttggcagcttgttcattg

SEQ ID NO: 1266 - DNA, 19 bp, Artificial Sequence
  Synthetic sequence
tttggcagcttgttcattg

SEQ ID NO: 1267 - DNA, 19 bp, Artificial Sequence
  Synthetic sequence
tttggcagcttgttcattg

SEQ ID NO: 1268 - DNA, 19 bp, Artificial Sequence
  Synthetic sequence
tttggcagcttgttcattg

SEQ ID NO: 1269 - DNA, 20 bp, Artificial Sequence
  Synthetic sequence
ctttggcagcttgttcattg

SEQ ID NO: 1270 - DNA, 20 bp, Artificial Sequence
  Synthetic sequence
ctttggcagcttgttcattg

SEQ ID NO: 1271 - DNA, 20 bp, Artificial Sequence
  Synthetic sequence
ctttggcagcttgttcattg

SEQ ID NO: 1272 - DNA, 20 bp, Artificial Sequence
  Synthetic sequence
ctttggcagcttgttcattg

SEQ ID NO: 1273 - DNA, 20 bp, Artificial Sequence
  Synthetic sequence
ctttggcagcttgttcattg

SEQ ID NO: 1274 - DNA, 20 bp, Artificial Sequence
  Synthetic sequence
ctttggcagcttgttcattg

SEQ ID NO: 1275 - DNA, 20 bp, Artificial Sequence
  Synthetic sequence
ctttggcagcttgttcattg

SEQ ID NO: 1276 - DNA, 20 bp, Artificial Sequence
  Synthetic sequence
ctttggcagcttgttcattg

SEQ ID NO: 1277 - DNA, 19 bp, Artificial Sequence
  Synthetic sequence
ctttggcagcttgttcatt

SEQ ID NO: 1278 - DNA, 19 bp, Artificial Sequence
  Synthetic sequence
ctttggcagcttgttcatt

SEQ ID NO: 1279 - DNA, 19 bp, Artificial Sequence
  Synthetic sequence
ctttggcagcttgttcatt

SEQ ID NO: 1280 - DNA, 19 bp, Artificial Sequence
  Synthetic sequence
ctttggcagcttgttcatt

SEQ ID NO: 1281 - DNA, 20 bp, Artificial Sequence
  Synthetic sequence
ctttggcagcttgttcattg

SEQ ID NO: 1282 - DNA, 20 bp, Artificial Sequence
  Synthetic sequence
ctttggcagcttgttcattg

SEQ ID NO: 1283 - DNA, 20 bp, Artificial Sequence
  Synthetic sequence
ctttggcagcttgttcattg

SEQ ID NO: 1284 - DNA, 18 bp, Artificial Sequence
  Synthetic sequence
ctttggcagcttgttcat

SEQ ID NO: 1285 - DNA, 18 bp, Artificial Sequence
  Synthetic sequence
ctttggcagcttgttcat

SEQ ID NO: 1286 - DNA, 18 bp, Artificial Sequence
  Synthetic sequence
ctttggcagcttgttcat

SEQ ID NO: 1287 - DNA, 18 bp, Artificial Sequence
  Synthetic sequence
ctttggcagcttgttcat

SEQ ID NO: 1288 - DNA, 18 bp, Artificial Sequence
  Synthetic sequence
ttggcagcttgttcattg

SEQ ID NO: 1289 - DNA, 18 bp, Artificial Sequence
  Synthetic sequence
ttggcagcttgttcattg

SEQ ID NO: 1290 - DNA, 18 bp, Artificial Sequence
  Synthetic sequence
ttggcagcttgttcattg

SEQ ID NO: 1291 - DNA, 18 bp, Artificial Sequence
  Synthetic sequence
ttggcagcttgttcattg

SEQ ID NO: 1292 - DNA, 20 bp, Artificial Sequence
  Synthetic sequence
ctttggcagcttgttcattg

SEQ ID NO: 1293 - DNA, 20 bp, Artificial Sequence
  Synthetic sequence
ctttggcagcttgttcattg

SEQ ID NO: 1294 - DNA, 20 bp, Artificial Sequence
  Synthetic sequence
ctttggcagcttgttcattg

SEQ ID NO: 1295 - DNA, 20 bp, Artificial Sequence
  Synthetic sequence
ctttggcagcttgttcattg

SEQ ID NO: 1296 - DNA, 20 bp, Artificial Sequence
  Synthetic sequence
ctttggcagcttgttcattg

SEQ ID NO: 1297 - DNA, 20 bp, Artificial Sequence
  Synthetic sequence
ctttggcagcttgttcattg

SEQ ID NO: 1298 - DNA, 19 bp, Artificial Sequence
  Synthetic sequence
ctttggcagcttgttcatt

SEQ ID NO: 1299 - DNA, 19 bp, Artificial Sequence
  Synthetic sequence
ctttggcagcttgttcatt

SEQ ID NO: 1300 - DNA, 19 bp, Artificial Sequence
  Synthetic sequence
ctttggcagcttgttcatt

SEQ ID NO: 1301 - DNA, 19 bp, Artificial Sequence
  Synthetic sequence
tttggcagcttgttcattg

SEQ ID NO: 1302 - DNA, 19 bp, Artificial Sequence
  Synthetic sequence
tttggcagcttgttcattg

SEQ ID NO: 1303 - DNA, 19 bp, Artificial Sequence
  Synthetic sequence
tttggcagcttgttcattg

SEQ ID NO: 1304 - DNA, 18 bp, Artificial Sequence
  Synthetic sequence
ctttggcagcttgttcat

SEQ ID NO: 1305 - DNA, 18 bp, Artificial Sequence
  Synthetic sequence
ctttggcagcttgttcat

SEQ ID NO: 1306 - DNA, 18 bp, Artificial Sequence
  Synthetic sequence
ctttggcagcttgttcat

SEQ ID NO: 1307 - DNA, 18 bp, Artificial Sequence
  Synthetic sequence
ttggcagcttgttcattg

SEQ ID NO: 1308 - DNA, 18 bp, Artificial Sequence
  Synthetic sequence
ttggcagcttgttcattg

SEQ ID NO: 1309 - DNA, 18 bp, Artificial Sequence
  Synthetic sequence
ttggcagcttgttcattg

SEQ ID NO: 1310 - DNA, 17 bp, Artificial Sequence
  Synthetic sequence
ctttggcagcttgttca

SEQ ID NO: 1311 - DNA, 17 bp, Artificial Sequence
  Synthetic sequence
ctttggcagcttgttca

SEQ ID NO: 1312 - DNA, 17 bp, Artificial Sequence
  Synthetic sequence
ctttggcagcttgttca

SEQ ID NO: 1313 - DNA, 17 bp, Artificial Sequence
  Synthetic sequence
tggcagcttgttcattg

SEQ ID NO: 1314 - DNA, 17 bp, Artificial Sequence
  Synthetic sequence
tggcagcttgttcattg

SEQ ID NO: 1315 - DNA, 17 bp, Artificial Sequence
  Synthetic sequence
tggcagcttgttcattg

SEQ ID NO: 1316 - DNA, 19 bp, Artificial Sequence
  Synthetic sequence
tttggcagcttgttcattg

SEQ ID NO: 1317 - DNA, 19 bp, Artificial Sequence
  Synthetic sequence
tttggcagcttgttcattg

SEQ ID NO: 1318 - DNA, 19 bp, Artificial Sequence
  Synthetic sequence
ctttggcagcttgttcatt

SEQ ID NO: 1319 - DNA, 19 bp, Artificial Sequence
  Synthetic sequence
ctttggcagcttgttcatt

SEQ ID NO: 1320 - DNA, 18 bp, Artificial Sequence
  Synthetic sequence
tttggcagcttgttcatt

SEQ ID NO: 1321 - DNA, 18 bp, Artificial Sequence
  Synthetic sequence
tttggcagcttgttcatt

SEQ ID NO: 1322 - DNA, 18 bp, Artificial Sequence
  Synthetic sequence
tttggcagcttgttcatt

SEQ ID NO: 1323 - DNA, 18 bp, Artificial Sequence
  Synthetic sequence
tttggcagcttgttcatt

SEQ ID NO: 1324 - DNA, 17 bp, Artificial Sequence
  Synthetic sequence
tttggcagcttgttcat

SEQ ID NO: 1325 - DNA, 17 bp, Artificial Sequence
  Synthetic sequence
tttggcagcttgttcat

SEQ ID NO: 1326 - DNA, 17 bp, Artificial Sequence
  Synthetic sequence
tttggcagcttgttcat

SEQ ID NO: 1327 - DNA, 20 bp, Artificial Sequence
  Synthetic sequence
ctttggcagcttgttcattg

SEQ ID NO: 1328 - DNA, 20 bp, Artificial Sequence
  Synthetic sequence
ctttggcagcttgttcattg

SEQ ID NO: 1329 - DNA, 20 bp, Artificial Sequence
  Synthetic sequence
ctttggcagcttgttcattg

SEQ ID NO: 1330 - DNA, 20 bp, Artificial Sequence
  Synthetic sequence
ctttggcagcttgttcattg

SEQ ID NO: 1331 - DNA, 19 bp, Artificial Sequence
  Synthetic sequence
ctttggcagcttgttcatt

SEQ ID NO: 1332 - DNA, 19 bp, Artificial Sequence
  Synthetic sequence
tttggcagcttgttcattg

SEQ ID NO: 1333 - DNA, 20 bp, Artificial Sequence
  Synthetic sequence
ctttggcagcttgttcattg

SEQ ID NO: 1334 - DNA, 20 bp, Artificial Sequence
  Synthetic sequence
ctttggcagcttgttcattg

SEQ ID NO: 1335 - DNA, 19 bp, Artificial Sequence
  Synthetic sequence
ctttggcagcttgttcatt

SEQ ID NO: 1336 - DNA, 20 bp, Artificial Sequence
  Synthetic sequence
ctttggcagcttgttcattg

SEQ ID NO: 1337 - DNA, 18 bp, Artificial Sequence
  Synthetic sequence
ctttggcagcttgttcat

SEQ ID NO: 1338 - DNA, 18 bp, Artificial Sequence
  Synthetic sequence
ttggcagcttgttcattg

SEQ ID NO: 1339 - DNA, 20 bp, Artificial Sequence
  Synthetic sequence
ctttggcagcttgttcattg

SEQ ID NO: 1340 - DNA, 19 bp, Artificial Sequence
  Synthetic sequence
ctttggcagcttgttcatt

SEQ ID NO: 1341 - DNA, 18 bp, Artificial Sequence
  Synthetic sequence
ctttggcagcttgttcat

SEQ ID NO: 1342 - DNA, 18 bp, Artificial Sequence
  Synthetic sequence
ttggcagcttgttcattg

SEQ ID NO: 1343 - DNA, 17 bp, Artificial Sequence
  Synthetic sequence
ctttggcagcttgttca

SEQ ID NO: 1344 - DNA, 17 bp, Artificial Sequence
  Synthetic sequence
tggcagcttgttcattg

SEQ ID NO: 1345 - DNA, 19 bp, Artificial Sequence
  Synthetic sequence
tttggcagcttgttcattg

SEQ ID NO: 1346 - DNA, 18 bp, Artificial Sequence
  Synthetic sequence
tttggcagcttgttcatt

SEQ ID NO: 1347 - DNA, 17 bp, Artificial Sequence
  Synthetic sequence
tttggcagcttgttcat

SEQ ID NO: 1348 - DNA, 20 bp, Artificial Sequence
  Synthetic sequence
ctttggcagcttgttcattg

SEQ ID NO: 1349 - DNA, 20 bp, Artificial Sequence
  Synthetic sequence
ctttggcagcttgttcattg

SEQ ID NO: 1350 - DNA, 20 bp, Artificial Sequence
  Synthetic sequence
ctttggcagcttgttcattg

SEQ ID NO: 1351 - DNA, 20 bp, Artificial Sequence
  Synthetic sequence
ctttggcagcttgttcattg

SEQ ID NO: 1352 - DNA, 20 bp, Artificial Sequence
  Synthetic sequence
ctttggcagcttgttcattg

SEQ ID NO: 1353 - DNA, 20 bp, Artificial Sequence
  Synthetic sequence
ctttggcagcttgttcattg

SEQ ID NO: 1354 - DNA, 20 bp, Artificial Sequence
  Synthetic sequence
ctttggcagcttgttcattg

SEQ ID NO: 1355 - DNA, 20 bp, Artificial Sequence
  Synthetic sequence
ctttggcagcttgttcattg

SEQ ID NO: 1356 - DNA, 20 bp, Artificial Sequence
  Synthetic sequence
ctttggcagcttgttcattg

SEQ ID NO: 1357 - DNA, 20 bp, Artificial Sequence
  Synthetic sequence
ctttggcagcttgttcattg

SEQ ID NO: 1358 - DNA, 20 bp, Artificial Sequence
  Synthetic sequence
ctttggcagcttgttcattg

SEQ ID NO: 1359 - DNA, 20 bp, Artificial Sequence
  Synthetic sequence
ctttggcagcttgttcattg

SEQ ID NO: 1360 - DNA, 20 bp, Artificial Sequence
  Synthetic sequence
ctttggcagcttgttcattg

SEQ ID NO: 1361 - DNA, 20 bp, Artificial Sequence
  Synthetic sequence
ctttggcagcttgttcattg

SEQ ID NO: 1362 - DNA, 20 bp, Artificial Sequence
  Synthetic sequence
ctttggcagcttgttcattg

SEQ ID NO: 1363 - DNA, 21 bp, Artificial Sequence
  Synthetic sequence
ctttggcagcttgttcattga

SEQ ID NO: 1364 - DNA, 21 bp, Artificial Sequence
  Synthetic sequence
ctttggcagcttgttcattga

SEQ ID NO: 1365 - DNA, 21 bp, Artificial Sequence
  Synthetic sequence
ctttggcagcttgttcattga

SEQ ID NO: 1366 - DNA, 21 bp, Artificial Sequence
  Synthetic sequence
ctttggcagcttgttcattga

SEQ ID NO: 1367 - DNA, 21 bp, Artificial Sequence
  Synthetic sequence
ctttggcagcttgttcattga

SEQ ID NO: 1368 - DNA, 21 bp, Artificial Sequence
  Synthetic sequence
ctttggcagcttgttcattga

SEQ ID NO: 1369 - DNA, 21 bp, Artificial Sequence
  Synthetic sequence
ctttggcagcttgttcattga

SEQ ID NO: 1370 - DNA, 21 bp, Artificial Sequence
  Synthetic sequence
ctttggcagcttgttcattga

SEQ ID NO: 1371 - DNA, 21 bp, Artificial Sequence
  Synthetic sequence
ctttggcagcttgttcattga

SEQ ID NO: 1372 - DNA, 21 bp, Artificial Sequence
  Synthetic sequence
ctttggcagcttgttcattga

SEQ ID NO: 1373 - DNA, 21 bp, Artificial Sequence
  Synthetic sequence
ctttggcagcttgttcattga

SEQ ID NO: 1374 - DNA, 21 bp, Artificial Sequence
  Synthetic sequence
ctttggcagcttgttcattga

SEQ ID NO: 1375 - DNA, 21 bp, Artificial Sequence
  Synthetic sequence
ctttggcagcttgttcattga

SEQ ID NO: 1376 - DNA, 21 bp, Artificial Sequence
  Synthetic sequence
ctttggcagcttgttcattga

SEQ ID NO: 1377 - DNA, 21 bp, Artificial Sequence
  Synthetic sequence
ctttggcagcttgttcattga

SEQ ID NO: 1378 - DNA, 21 bp, Artificial Sequence
  Synthetic sequence
ctttggcagcttgttcattga

SEQ ID NO: 1379 - DNA, 22 bp, Artificial Sequence
  Synthetic sequence
ctttggcagcttgttcattgag

SEQ ID NO: 1380 - DNA, 22 bp, Artificial Sequence
  Synthetic sequence
ctttggcagcttgttcattgag

SEQ ID NO: 1381 - DNA, 22 bp, Artificial Sequence
  Synthetic sequence
ctttggcagcttgttcattgag

SEQ ID NO: 1382 - DNA, 22 bp, Artificial Sequence
  Synthetic sequence
ctttggcagcttgttcattgag

SEQ ID NO: 1383 - DNA, 22 bp, Artificial Sequence
  Synthetic sequence
ctttggcagcttgttcattgag

SEQ ID NO: 1384 - DNA, 22 bp, Artificial Sequence
  Synthetic sequence
ctttggcagcttgttcattgag

SEQ ID NO: 1385 - DNA, 22 bp, Artificial Sequence
  Synthetic sequence
ctttggcagcttgttcattgag

SEQ ID NO: 1386 - DNA, 22 bp, Artificial Sequence
  Synthetic sequence
ctttggcagcttgttcattgag

SEQ ID NO: 1387 - DNA, 22 bp, Artificial Sequence
  Synthetic sequence
ctttggcagcttgttcattgag

SEQ ID NO: 1388 - DNA, 22 bp, Artificial Sequence
  Synthetic sequence
ctttggcagcttgttcattgag

SEQ ID NO: 1389 - DNA, 22 bp, Artificial Sequence
  Synthetic sequence
ctttggcagcttgttcattgag

SEQ ID NO: 1390 - DNA, 22 bp, Artificial Sequence
  Synthetic sequence
ctttggcagcttgttcattgag

SEQ ID NO: 1391 - DNA, 22 bp, Artificial Sequence
  Synthetic sequence
ctttggcagcttgttcattgag

SEQ ID NO: 1392 - DNA, 22 bp, Artificial Sequence
  Synthetic sequence
ctttggcagcttgttcattgag

SEQ ID NO: 1393 - DNA, 22 bp, Artificial Sequence
  Synthetic sequence
ctttggcagcttgttcattgag

SEQ ID NO: 1394 - DNA, 22 bp, Artificial Sequence
  Synthetic sequence
ctttggcagcttgttcattgag

SEQ ID NO: 1395 - DNA, 23 bp, Artificial Sequence
  Synthetic sequence
ctttggcagcttgttcattgagt

SEQ ID NO: 1396 - DNA, 23 bp, Artificial Sequence
  Synthetic sequence
ctttggcagcttgttcattgagt

SEQ ID NO: 1397 - DNA, 23 bp, Artificial Sequence
  Synthetic sequence
ctttggcagcttgttcattgagt

SEQ ID NO: 1398 - DNA, 23 bp, Artificial Sequence
  Synthetic sequence
ctttggcagcttgttcattgagt

SEQ ID NO: 1399 - DNA, 23 bp, Artificial Sequence
  Synthetic sequence
ctttggcagcttgttcattgagt

SEQ ID NO: 1400 - DNA, 23 bp, Artificial Sequence
  Synthetic sequence
ctttggcagcttgttcattgagt

SEQ ID NO: 1401 - DNA, 23 bp, Artificial Sequence
  Synthetic sequence
ctttggcagcttgttcattgagt

SEQ ID NO: 1402 - DNA, 23 bp, Artificial Sequence
  Synthetic sequence
ctttggcagcttgttcattgagt

SEQ ID NO: 1403 - DNA, 23 bp, Artificial Sequence
  Synthetic sequence
ctttggcagcttgttcattgagt

SEQ ID NO: 1404 - DNA, 23 bp, Artificial Sequence
  Synthetic sequence
ctttggcagcttgttcattgagt

SEQ ID NO: 1405 - DNA, 23 bp, Artificial Sequence
  Synthetic sequence
ctttggcagcttgttcattgagt

SEQ ID NO: 1406 - DNA, 23 bp, Artificial Sequence
  Synthetic sequence
ctttggcagcttgttcattgagt

SEQ ID NO: 1407 - DNA, 23 bp, Artificial Sequence
  Synthetic sequence
ctttggcagcttgttcattgagt

SEQ ID NO: 1408 - DNA, 23 bp, Artificial Sequence
  Synthetic sequence
ctttggcagcttgttcattgagt

SEQ ID NO: 1409 - DNA, 23 bp, Artificial Sequence
  Synthetic sequence
ctttggcagcttgttcattgagt

SEQ ID NO: 1410 - DNA, 23 bp, Artificial Sequence
  Synthetic sequence
ctttggcagcttgttcattgagt

SEQ ID NO: 1411 - DNA, 21 bp, Artificial Sequence
  Synthetic sequence
ctttggcagcttgttcattga

SEQ ID NO: 1412 - DNA, 21 bp, Artificial Sequence
  Synthetic sequence
ctttggcagcttgttcattga

SEQ ID NO: 1413 - DNA, 21 bp, Artificial Sequence
  Synthetic sequence
ctttggcagcttgttcattga

SEQ ID NO: 1414 - DNA, 21 bp, Artificial Sequence
  Synthetic sequence
ctttggcagcttgttcattga

SEQ ID NO: 1415 - DNA, 21 bp, Artificial Sequence
  Synthetic sequence
ctttggcagcttgttcattga

SEQ ID NO: 1416 - DNA, 21 bp, Artificial Sequence
  Synthetic sequence
ctttggcagcttgttcattga

SEQ ID NO: 1417 - DNA, 21 bp, Artificial Sequence
  Synthetic sequence
ctttggcagcttgttcattga

SEQ ID NO: 1418 - DNA, 21 bp, Artificial Sequence
  Synthetic sequence
ctttggcagcttgttcattga

SEQ ID NO: 1419 - DNA, 21 bp, Artificial Sequence
  Synthetic sequence
ctttggcagcttgttcattga

SEQ ID NO: 1420 - DNA, 21 bp, Artificial Sequence
  Synthetic sequence
ctttggcagcttgttcattga

SEQ ID NO: 1421 - DNA, 21 bp, Artificial Sequence
  Synthetic sequence
ctttggcagcttgttcattga

SEQ ID NO: 1422 - DNA, 21 bp, Artificial Sequence
  Synthetic sequence
ctttggcagcttgttcattga

SEQ ID NO: 1423 - DNA, 21 bp, Artificial Sequence
  Synthetic sequence
ctttggcagcttgttcattga

SEQ ID NO: 1424 - DNA, 21 bp, Artificial Sequence
  Synthetic sequence
ctttggcagcttgttcattga

SEQ ID NO: 1425 - DNA, 21 bp, Artificial Sequence
  Synthetic sequence
ctttggcagcttgttcattga

SEQ ID NO: 1426 - DNA, 21 bp, Artificial Sequence
  Synthetic sequence
ctttggcagcttgttcattga

SEQ ID NO: 1427 - DNA, 22 bp, Artificial Sequence
  Synthetic sequence
ctttggcagcttgttcattgag

SEQ ID NO: 1428 - DNA, 22 bp, Artificial Sequence
  Synthetic sequence
ctttggcagcttgttcattgag

SEQ ID NO: 1429 - DNA, 22 bp, Artificial Sequence
  Synthetic sequence
ctttggcagcttgttcattgag

SEQ ID NO: 1430 - DNA, 22 bp, Artificial Sequence
  Synthetic sequence
ctttggcagcttgttcattgag

SEQ ID NO: 1431 - DNA, 22 bp, Artificial Sequence
  Synthetic sequence
ctttggcagcttgttcattgag

SEQ ID NO: 1432 - DNA, 22 bp, Artificial Sequence
  Synthetic sequence
ctttggcagcttgttcattgag

SEQ ID NO: 1433 - DNA, 22 bp, Artificial Sequence
  Synthetic sequence
ctttggcagcttgttcattgag

SEQ ID NO: 1434 - DNA, 22 bp, Artificial Sequence
  Synthetic sequence
ctttggcagcttgttcattgag

SEQ ID NO: 1435 - DNA, 22 bp, Artificial Sequence
  Synthetic sequence
ctttggcagcttgttcattgag

SEQ ID NO: 1436 - DNA, 22 bp, Artificial Sequence
  Synthetic sequence
ctttggcagcttgttcattgag

SEQ ID NO: 1437 - DNA, 22 bp, Artificial Sequence
  Synthetic sequence
ctttggcagcttgttcattgag

SEQ ID NO: 1438 - DNA, 22 bp, Artificial Sequence
  Synthetic sequence
ctttggcagcttgttcattgag

SEQ ID NO: 1439 - DNA, 22 bp, Artificial Sequence
  Synthetic sequence
ctttggcagcttgttcattgag

SEQ ID NO: 1440 - DNA, 22 bp, Artificial Sequence
  Synthetic sequence
ctttggcagcttgttcattgag

SEQ ID NO: 1441 - DNA, 22 bp, Artificial Sequence
  Synthetic sequence
ctttggcagcttgttcattgag

SEQ ID NO: 1442 - DNA, 22 bp, Artificial Sequence
  Synthetic sequence
ctttggcagcttgttcattgag

SEQ ID NO: 1443 - DNA, 20 bp, Artificial Sequence
  Synthetic sequence
gtatttttcgtatttcttgc

SEQ ID NO: 1444 - DNA, 20 bp, Artificial Sequence
  Synthetic sequence
gtatttttcgtatttcttgc

SEQ ID NO: 1445 - DNA, 20 bp, Artificial Sequence
  Synthetic sequence
gtatttttcgtatttcttgc

SEQ ID NO: 1446 - DNA, 20 bp, Artificial Sequence
  Synthetic sequence
gtatttttcgtatttcttgc

SEQ ID NO: 1447 - DNA, 20 bp, Artificial Sequence
  Synthetic sequence
gtatttttcgtatttcttgc

SEQ ID NO: 1448 - DNA, 20 bp, Artificial Sequence
  Synthetic sequence
gtatttttcgtatttcttgc

SEQ ID NO: 1449 - DNA, 20 bp, Artificial Sequence
  Synthetic sequence
gtatttttcgtatttcttgc

SEQ ID NO: 1450 - DNA, 20 bp, Artificial Sequence
  Synthetic sequence
gtatttttcgtatttcttgc

SEQ ID NO: 1451 - DNA, 20 bp, Artificial Sequence
  Synthetic sequence
gtatttttcgtatttcttgc

SEQ ID NO: 1452 - DNA, 20 bp, Artificial Sequence
  Synthetic sequence
gtatttttcgtatttcttgc

SEQ ID NO: 1453 - DNA, 20 bp, Artificial Sequence
  Synthetic sequence
gtatttttcgtatttcttgc

SEQ ID NO: 1454 - DNA, 20 bp, Artificial Sequence
  Synthetic sequence
gtatttttcgtatttcttgc

SEQ ID NO: 1455 - DNA, 20 bp, Artificial Sequence
  Synthetic sequence
gtatttttcgtatttcttgc

SEQ ID NO: 1456 - DNA, 20 bp, Artificial Sequence
  Synthetic sequence
gtatttttcgtatttcttgc

SEQ ID NO: 1457 - DNA, 20 bp, Artificial Sequence
  Synthetic sequence
gtatttttcgtatttcttgc

SEQ ID NO: 1458 - DNA, 20 bp, Artificial Sequence
  Synthetic sequence
gtatttttcgtatttcttgc

SEQ ID NO: 1459 - DNA, 20 bp, Artificial Sequence
  Synthetic sequence
gtatttttcgtatttcttgc

SEQ ID NO: 1460 - DNA, 20 bp, Artificial Sequence
  Synthetic sequence
gtatttttcgtatttcttgc

SEQ ID NO: 1461 - DNA, 20 bp, Artificial Sequence
  Synthetic sequence
gtatttttcgtatttcttgc

SEQ ID NO: 1462 - DNA, 20 bp, Artificial Sequence
  Synthetic sequence
gtatttttcgtatttcttgc

SEQ ID NO: 1463 - DNA, 20 bp, Artificial Sequence
  Synthetic sequence
gtatttttcgtatttcttgc

SEQ ID NO: 1464 - DNA, 20 bp, Artificial Sequence
  Synthetic sequence
gtatttttcgtatttcttgc

SEQ ID NO: 1465 - DNA, 19 bp, Artificial Sequence
  Synthetic sequence
gtatttttcgtatttcttg

SEQ ID NO: 1466 - DNA, 19 bp, Artificial Sequence
  Synthetic sequence
gtatttttcgtatttcttg

SEQ ID NO: 1467 - DNA, 19 bp, Artificial Sequence
  Synthetic sequence
gtatttttcgtatttcttg

SEQ ID NO: 1468 - DNA, 19 bp, Artificial Sequence
  Synthetic sequence
gtatttttcgtatttcttg

SEQ ID NO: 1469 - DNA, 19 bp, Artificial Sequence
  Synthetic sequence
gtatttttcgtatttcttg

SEQ ID NO: 1470 - DNA, 19 bp, Artificial Sequence
  Synthetic sequence
tatttttcgtatttcttgc

SEQ ID NO: 1471 - DNA, 19 bp, Artificial Sequence
  Synthetic sequence
tatttttcgtatttcttgc

SEQ ID NO: 1472 - DNA, 19 bp, Artificial Sequence
  Synthetic sequence
tatttttcgtatttcttgc

SEQ ID NO: 1473 - DNA, 19 bp, Artificial Sequence
  Synthetic sequence
tatttttcgtatttcttgc

SEQ ID NO: 1474 - DNA, 19 bp, Artificial Sequence
  Synthetic sequence
tatttttcgtatttcttgc

SEQ ID NO: 1475 - DNA, 20 bp, Artificial Sequence
  Synthetic sequence
gtatttttcgtatttcttgc

SEQ ID NO: 1476 - DNA, 20 bp, Artificial Sequence
  Synthetic sequence
gtatttttcgtatttcttgc

SEQ ID NO: 1477 - DNA, 20 bp, Artificial Sequence
  Synthetic sequence
gtatttttcgtatttcttgc

SEQ ID NO: 1478 - DNA, 20 bp, Artificial Sequence
  Synthetic sequence
gtatttttcgtatttcttgc

SEQ ID NO: 1479 - DNA, 20 bp, Artificial Sequence
  Synthetic sequence
gtatttttcgtatttcttgc

SEQ ID NO: 1480 - DNA, 20 bp, Artificial Sequence
  Synthetic sequence
gtatttttcgtatttcttgc

SEQ ID NO: 1481 - DNA, 20 bp, Artificial Sequence
  Synthetic sequence
gtatttttcgtatttcttgc

SEQ ID NO: 1482 - DNA, 20 bp, Artificial Sequence
  Synthetic sequence
gtatttttcgtatttcttgc

SEQ ID NO: 1483 - DNA, 19 bp, Artificial Sequence
  Synthetic sequence
gtatttttcgtatttcttg

SEQ ID NO: 1484 - DNA, 19 bp, Artificial Sequence
  Synthetic sequence
gtatttttcgtatttcttg

SEQ ID NO: 1485 - DNA, 19 bp, Artificial Sequence
  Synthetic sequence
gtatttttcgtatttcttg

SEQ ID NO: 1486 - DNA, 19 bp, Artificial Sequence
  Synthetic sequence
gtatttttcgtatttcttg

SEQ ID NO: 1487 - DNA, 20 bp, Artificial Sequence
  Synthetic sequence
gtatttttcgtatttcttgc

SEQ ID NO: 1488 - DNA, 20 bp, Artificial Sequence
  Synthetic sequence
gtatttttcgtatttcttgc

SEQ ID NO: 1489 - DNA, 20 bp, Artificial Sequence
  Synthetic sequence
gtatttttcgtatttcttgc

SEQ ID NO: 1490 - DNA, 18 bp, Artificial Sequence
  Synthetic sequence
gtatttttcgtatttctt

SEQ ID NO: 1491 - DNA, 18 bp, Artificial Sequence
  Synthetic sequence
gtatttttcgtatttctt

SEQ ID NO: 1492 - DNA, 18 bp, Artificial Sequence
  Synthetic sequence
gtatttttcgtatttctt

SEQ ID NO: 1493 - DNA, 18 bp, Artificial Sequence
  Synthetic sequence
gtatttttcgtatttctt

SEQ ID NO: 1494 - DNA, 18 bp, Artificial Sequence
  Synthetic sequence
atttttcgtatttcttgc

SEQ ID NO: 1495 - DNA, 18 bp, Artificial Sequence
  Synthetic sequence
atttttcgtatttcttgc

SEQ ID NO: 1496 - DNA, 18 bp, Artificial Sequence
  Synthetic sequence
atttttcgtatttcttgc

SEQ ID NO: 1497 - DNA, 18 bp, Artificial Sequence
  Synthetic sequence
atttttcgtatttcttgc

SEQ ID NO: 1498 - DNA, 20 bp, Artificial Sequence
  Synthetic sequence
gtatttttcgtatttcttgc

SEQ ID NO: 1499 - DNA, 20 bp, Artificial Sequence
  Synthetic sequence
gtatttttcgtatttcttgc

SEQ ID NO: 1500 - DNA, 20 bp, Artificial Sequence
  Synthetic sequence
gtatttttcgtatttcttgc

SEQ ID NO: 1501 - DNA, 20 bp, Artificial Sequence
  Synthetic sequence
gtatttttcgtatttcttgc

SEQ ID NO: 1502 - DNA, 20 bp, Artificial Sequence
  Synthetic sequence
gtatttttcgtatttcttgc

SEQ ID NO: 1503 - DNA, 20 bp, Artificial Sequence
  Synthetic sequence
gtatttttcgtatttcttgc

SEQ ID NO: 1504 - DNA, 19 bp, Artificial Sequence
  Synthetic sequence
gtatttttcgtatttcttg

SEQ ID NO: 1505 - DNA, 19 bp, Artificial Sequence
  Synthetic sequence
gtatttttcgtatttcttg

SEQ ID NO: 1506 - DNA, 19 bp, Artificial Sequence
  Synthetic sequence
gtatttttcgtatttcttg

SEQ ID NO: 1507 - DNA, 19 bp, Artificial Sequence
  Synthetic sequence
tatttttcgtatttcttgc

SEQ ID NO: 1508 - DNA, 19 bp, Artificial Sequence
  Synthetic sequence
tatttttcgtatttcttgc

SEQ ID NO: 1509 - DNA, 19 bp, Artificial Sequence
  Synthetic sequence
tatttttcgtatttcttgc

SEQ ID NO: 1510 - DNA, 18 bp, Artificial Sequence
  Synthetic sequence
gtatttttcgtatttctt

SEQ ID NO: 1511 - DNA, 18 bp, Artificial Sequence
  Synthetic sequence
gtatttttcgtatttctt

SEQ ID NO: 1512 - DNA, 18 bp, Artificial Sequence
  Synthetic sequence
gtatttttcgtatttctt

SEQ ID NO: 1513 - DNA, 18 bp, Artificial Sequence
  Synthetic sequence
atttttcgtatttcttgc

SEQ ID NO: 1514 - DNA, 18 bp, Artificial Sequence
  Synthetic sequence
atttttcgtatttcttgc

SEQ ID NO: 1515 - DNA, 18 bp, Artificial Sequence
  Synthetic sequence
atttttcgtatttcttgc

SEQ ID NO: 1516 - DNA, 17 bp, Artificial Sequence
  Synthetic sequence
gtatttttcgtatttct

SEQ ID NO: 1517 - DNA, 17 bp, Artificial Sequence
  Synthetic sequence
gtatttttcgtatttct

SEQ ID NO: 1518 - DNA, 17 bp, Artificial Sequence
  Synthetic sequence
gtatttttcgtatttct

SEQ ID NO: 1519 - DNA, 17 bp, Artificial Sequence
  Synthetic sequence
tttttcgtatttcttgc

SEQ ID NO: 1520 - DNA, 17 bp, Artificial Sequence
  Synthetic sequence
tttttcgtatttcttgc

SEQ ID NO: 1521 - DNA, 17 bp, Artificial Sequence
  Synthetic sequence
tttttcgtatttcttgc

SEQ ID NO: 1522 - DNA, 19 bp, Artificial Sequence
  Synthetic sequence
tatttttcgtatttcttgc

SEQ ID NO: 1523 - DNA, 19 bp, Artificial Sequence
  Synthetic sequence
tatttttcgtatttcttgc

SEQ ID NO: 1524 - DNA, 19 bp, Artificial Sequence
  Synthetic sequence
gtatttttcgtatttcttg

SEQ ID NO: 1525 - DNA, 19 bp, Artificial Sequence
  Synthetic sequence
gtatttttcgtatttcttg

SEQ ID NO: 1526 - DNA, 18 bp, Artificial Sequence
  Synthetic sequence
tatttttcgtatttcttg

SEQ ID NO: 1527 - DNA, 18 bp, Artificial Sequence
  Synthetic sequence
tatttttcgtatttcttg

SEQ ID NO: 1528 - DNA, 18 bp, Artificial Sequence
  Synthetic sequence
tatttttcgtatttcttg

SEQ ID NO: 1529 - DNA, 18 bp, Artificial Sequence
  Synthetic sequence
tatttttcgtatttcttg

SEQ ID NO: 1530 - DNA, 17 bp, Artificial Sequence
  Synthetic sequence
tatttttcgtatttctt

SEQ ID NO: 1531 - DNA, 17 bp, Artificial Sequence
  Synthetic sequence
tatttttcgtatttctt

SEQ ID NO: 1532 - DNA, 17 bp, Artificial Sequence
  Synthetic sequence
tatttttcgtatttctt

SEQ ID NO: 1533 - DNA, 20 bp, Artificial Sequence
  Synthetic sequence
gtatttttcgtatttcttgc

SEQ ID NO: 1534 - DNA, 20 bp, Artificial Sequence
  Synthetic sequence
gtatttttcgtatttcttgc

SEQ ID NO: 1535 - DNA, 20 bp, Artificial Sequence
  Synthetic sequence
gtatttttcgtatttcttgc

SEQ ID NO: 1536 - DNA, 20 bp, Artificial Sequence
  Synthetic sequence
gtatttttcgtatttcttgc

SEQ ID NO: 1537 - DNA, 19 bp, Artificial Sequence
  Synthetic sequence
gtatttttcgtatttcttg

SEQ ID NO: 1538 - DNA, 19 bp, Artificial Sequence
  Synthetic sequence
tatttttcgtatttcttgc

SEQ ID NO: 1539 - DNA, 20 bp, Artificial Sequence
  Synthetic sequence
gtatttttcgtatttcttgc

SEQ ID NO: 1540 - DNA, 20 bp, Artificial Sequence
  Synthetic sequence
gtatttttcgtatttcttgc

SEQ ID NO: 1541 - DNA, 19 bp, Artificial Sequence
  Synthetic sequence
gtatttttcgtatttcttg

SEQ ID NO: 1542 - DNA, 20 bp, Artificial Sequence
  Synthetic sequence
gtatttttcgtatttcttgc

SEQ ID NO: 1543 - DNA, 18 bp, Artificial Sequence
  Synthetic sequence
gtatttttcgtatttctt

SEQ ID NO: 1544 - DNA, 18 bp, Artificial Sequence
  Synthetic sequence
atttttcgtatttcttgc

SEQ ID NO: 1545 - DNA, 20 bp, Artificial Sequence
  Synthetic sequence
gtatttttcgtatttcttgc

SEQ ID NO: 1546 - DNA, 19 bp, Artificial Sequence
  Synthetic sequence
gtatttttcgtatttcttg

SEQ ID NO: 1547 - DNA, 18 bp, Artificial Sequence
  Synthetic sequence
gtatttttcgtatttctt

SEQ ID NO: 1548 - DNA, 18 bp, Artificial Sequence
  Synthetic sequence
atttttcgtatttcttgc

SEQ ID NO: 1549 - DNA, 17 bp, Artificial Sequence
  Synthetic sequence
gtatttttcgtatttct

SEQ ID NO: 1550 - DNA, 17 bp, Artificial Sequence
  Synthetic sequence
tttttcgtatttcttgc

SEQ ID NO: 1551 - DNA, 19 bp, Artificial Sequence
  Synthetic sequence
tatttttcgtatttcttgc

SEQ ID NO: 1552 - DNA, 18 bp, Artificial Sequence
  Synthetic sequence
tatttttcgtatttcttg

SEQ ID NO: 1553 - DNA, 17 bp, Artificial Sequence
  Synthetic sequence
tatttttcgtatttctt

SEQ ID NO: 1554 - DNA, 20 bp, Artificial Sequence
  Synthetic sequence
gtatttttcgtatttcttgc

SEQ ID NO: 1555 - DNA, 20 bp, Artificial Sequence
  Synthetic sequence
gtatttttcgtatttcttgc

SEQ ID NO: 1556 - DNA, 20 bp, Artificial Sequence
  Synthetic sequence
gtatttttcgtatttcttgc

SEQ ID NO: 1557 - DNA, 20 bp, Artificial Sequence
  Synthetic sequence
gtatttttcgtatttcttgc

SEQ ID NO: 1558 - DNA, 20 bp, Artificial Sequence
  Synthetic sequence
gtatttttcgtatttcttgc

SEQ ID NO: 1559 - DNA, 20 bp, Artificial Sequence
  Synthetic sequence
gtatttttcgtatttcttgc

SEQ ID NO: 1560 - DNA, 20 bp, Artificial Sequence
  Synthetic sequence
gtatttttcgtatttcttgc

SEQ ID NO: 1561 - DNA, 20 bp, Artificial Sequence
  Synthetic sequence
gtatttttcgtatttcttgc

SEQ ID NO: 1562 - DNA, 20 bp, Artificial Sequence
  Synthetic sequence
gtatttttcgtatttcttgc

SEQ ID NO: 1563 - DNA, 20 bp, Artificial Sequence
  Synthetic sequence
gtatttttcgtatttcttgc

SEQ ID NO: 1564 - DNA, 20 bp, Artificial Sequence
  Synthetic sequence
gtatttttcgtatttcttgc

SEQ ID NO: 1565 - DNA, 20 bp, Artificial Sequence
  Synthetic sequence
gtatttttcgtatttcttgc

SEQ ID NO: 1566 - DNA, 20 bp, Artificial Sequence
  Synthetic sequence
gtatttttcgtatttcttgc

SEQ ID NO: 1567 - DNA, 20 bp, Artificial Sequence
  Synthetic sequence
gtatttttcgtatttcttgc

SEQ ID NO: 1568 - DNA, 20 bp, Artificial Sequence
  Synthetic sequence
gtatttttcgtatttcttgc

SEQ ID NO: 1569 - DNA, 21 bp, Artificial Sequence
  Synthetic sequence
gtatttttcgtatttcttgca

SEQ ID NO: 1570 - DNA, 21 bp, Artificial Sequence
  Synthetic sequence
gtatttttcgtatttcttgca

SEQ ID NO: 1571 - DNA, 21 bp, Artificial Sequence
  Synthetic sequence
gtatttttcgtatttcttgca

SEQ ID NO: 1572 - DNA, 21 bp, Artificial Sequence
  Synthetic sequence
gtatttttcgtatttcttgca

SEQ ID NO: 1573 - DNA, 21 bp, Artificial Sequence
  Synthetic sequence
gtatttttcgtatttcttgca

SEQ ID NO: 1574 - DNA, 21 bp, Artificial Sequence
  Synthetic sequence
gtatttttcgtatttcttgca

SEQ ID NO: 1575 - DNA, 21 bp, Artificial Sequence
  Synthetic sequence
gtatttttcgtatttcttgca

SEQ ID NO: 1576 - DNA, 21 bp, Artificial Sequence
  Synthetic sequence
gtatttttcgtatttcttgca

SEQ ID NO: 1577 - DNA, 21 bp, Artificial Sequence
  Synthetic sequence
gtatttttcgtatttcttgca

SEQ ID NO: 1578 - DNA, 21 bp, Artificial Sequence
  Synthetic sequence
gtatttttcgtatttcttgca

SEQ ID NO: 1579 - DNA, 21 bp, Artificial Sequence
  Synthetic sequence
gtatttttcgtatttcttgca

SEQ ID NO: 1580 - DNA, 21 bp, Artificial Sequence
  Synthetic sequence
gtatttttcgtatttcttgca

SEQ ID NO: 1581 - DNA, 21 bp, Artificial Sequence
  Synthetic sequence
gtatttttcgtatttcttgca

SEQ ID NO: 1582 - DNA, 21 bp, Artificial Sequence
  Synthetic sequence
gtatttttcgtatttcttgca

SEQ ID NO: 1583 - DNA, 21 bp, Artificial Sequence
  Synthetic sequence
gtatttttcgtatttcttgca

SEQ ID NO: 1584 - DNA, 21 bp, Artificial Sequence
  Synthetic sequence
gtatttttcgtatttcttgca

SEQ ID NO: 1585 - DNA, 22 bp, Artificial Sequence
  Synthetic sequence
gtatttttcgtatttcttgcaa

SEQ ID NO: 1586 - DNA, 22 bp, Artificial Sequence
  Synthetic sequence
gtatttttcgtatttcttgcaa

SEQ ID NO: 1587 - DNA, 22 bp, Artificial Sequence
  Synthetic sequence
gtatttttcgtatttcttgcaa

SEQ ID NO: 1588 - DNA, 22 bp, Artificial Sequence
  Synthetic sequence
gtatttttcgtatttcttgcaa

SEQ ID NO: 1589 - DNA, 22 bp, Artificial Sequence
  Synthetic sequence
gtatttttcgtatttcttgcaa

SEQ ID NO: 1590 - DNA, 22 bp, Artificial Sequence
  Synthetic sequence
gtatttttcgtatttcttgcaa

SEQ ID NO: 1591 - DNA, 22 bp, Artificial Sequence
  Synthetic sequence
gtatttttcgtatttcttgcaa

SEQ ID NO: 1592 - DNA, 22 bp, Artificial Sequence
  Synthetic sequence
gtatttttcgtatttcttgcaa

SEQ ID NO: 1593 - DNA, 22 bp, Artificial Sequence
  Synthetic sequence
gtatttttcgtatttcttgcaa

SEQ ID NO: 1594 - DNA, 22 bp, Artificial Sequence
  Synthetic sequence
gtatttttcgtatttcttgcaa

SEQ ID NO: 1595 - DNA, 22 bp, Artificial Sequence
  Synthetic sequence
gtatttttcgtatttcttgcaa

SEQ ID NO: 1596 - DNA, 22 bp, Artificial Sequence
  Synthetic sequence
gtatttttcgtatttcttgcaa

SEQ ID NO: 1597 - DNA, 22 bp, Artificial Sequence
  Synthetic sequence
gtatttttcgtatttcttgcaa

SEQ ID NO: 1598 - DNA, 22 bp, Artificial Sequence
  Synthetic sequence
gtatttttcgtatttcttgcaa

SEQ ID NO: 1599 - DNA, 22 bp, Artificial Sequence
  Synthetic sequence
gtatttttcgtatttcttgcaa

SEQ ID NO: 1600 - DNA, 22 bp, Artificial Sequence
  Synthetic sequence
gtatttttcgtatttcttgcaa

SEQ ID NO: 1601 - DNA, 23 bp, Artificial Sequence
  Synthetic sequence
gtatttttcgtatttcttgcaaa

SEQ ID NO: 1602 - DNA, 23 bp, Artificial Sequence
  Synthetic sequence
gtatttttcgtatttcttgcaaa

SEQ ID NO: 1603 - DNA, 23 bp, Artificial Sequence
  Synthetic sequence
gtatttttcgtatttcttgcaaa

SEQ ID NO: 1604 - DNA, 23 bp, Artificial Sequence
  Synthetic sequence
gtatttttcgtatttcttgcaaa

SEQ ID NO: 1605 - DNA, 23 bp, Artificial Sequence
  Synthetic sequence
gtatttttcgtatttcttgcaaa

SEQ ID NO: 1606 - DNA, 23 bp, Artificial Sequence
  Synthetic sequence
gtatttttcgtatttcttgcaaa

SEQ ID NO: 1607 - DNA, 23 bp, Artificial Sequence
  Synthetic sequence
gtatttttcgtatttcttgcaaa

SEQ ID NO: 1608 - DNA, 23 bp, Artificial Sequence
  Synthetic sequence
gtatttttcgtatttcttgcaaa

SEQ ID NO: 1609 - DNA, 23 bp, Artificial Sequence
  Synthetic sequence
gtatttttcgtatttcttgcaaa

SEQ ID NO: 1610 - DNA, 23 bp, Artificial Sequence
  Synthetic sequence
gtatttttcgtatttcttgcaaa

SEQ ID NO: 1611 - DNA, 23 bp, Artificial Sequence
  Synthetic sequence
gtatttttcgtatttcttgcaaa

SEQ ID NO: 1612 - DNA, 23 bp, Artificial Sequence
  Synthetic sequence
gtatttttcgtatttcttgcaaa

SEQ ID NO: 1613 - DNA, 23 bp, Artificial Sequence
  Synthetic sequence
gtatttttcgtatttcttgcaaa

SEQ ID NO: 1614 - DNA, 23 bp, Artificial Sequence
  Synthetic sequence
gtatttttcgtatttcttgcaaa

SEQ ID NO: 1615 - DNA, 23 bp, Artificial Sequence
  Synthetic sequence
gtatttttcgtatttcttgcaaa

SEQ ID NO: 1616 - DNA, 23 bp, Artificial Sequence
  Synthetic sequence
gtatttttcgtatttcttgcaaa

SEQ ID NO: 1617 - DNA, 21 bp, Artificial Sequence
  Synthetic sequence
gtatttttcgtatttcttgca

SEQ ID NO: 1618 - DNA, 21 bp, Artificial Sequence
  Synthetic sequence
gtatttttcgtatttcttgca

SEQ ID NO: 1619 - DNA, 21 bp, Artificial Sequence
  Synthetic sequence
gtatttttcgtatttcttgca

SEQ ID NO: 1620 - DNA, 21 bp, Artificial Sequence
  Synthetic sequence
gtatttttcgtatttcttgca

SEQ ID NO: 1621 - DNA, 21 bp, Artificial Sequence
  Synthetic sequence
gtatttttcgtatttcttgca

SEQ ID NO: 1622 - DNA, 21 bp, Artificial Sequence
  Synthetic sequence
gtatttttcgtatttcttgca

SEQ ID NO: 1623 - DNA, 21 bp, Artificial Sequence
  Synthetic sequence
gtatttttcgtatttcttgca

SEQ ID NO: 1624 - DNA, 21 bp, Artificial Sequence
  Synthetic sequence
gtatttttcgtatttcttgca

SEQ ID NO: 1625 - DNA, 21 bp, Artificial Sequence
  Synthetic sequence
gtatttttcgtatttcttgca

SEQ ID NO: 1626 - DNA, 21 bp, Artificial Sequence
  Synthetic sequence
gtatttttcgtatttcttgca

SEQ ID NO: 1627 - DNA, 21 bp, Artificial Sequence
  Synthetic sequence
gtatttttcgtatttcttgca

SEQ ID NO: 1628 - DNA, 21 bp, Artificial Sequence
  Synthetic sequence
gtatttttcgtatttcttgca

SEQ ID NO: 1629 - DNA, 21 bp, Artificial Sequence
  Synthetic sequence
gtatttttcgtatttcttgca

SEQ ID NO: 1630 - DNA, 21 bp, Artificial Sequence
  Synthetic sequence
gtatttttcgtatttcttgca

SEQ ID NO: 1631 - DNA, 21 bp, Artificial Sequence
  Synthetic sequence
gtatttttcgtatttcttgca

SEQ ID NO: 1632 - DNA, 21 bp, Artificial Sequence
  Synthetic sequence
gtatttttcgtatttcttgca

SEQ ID NO: 1633 - DNA, 22 bp, Artificial Sequence
  Synthetic sequence
gtatttttcgtatttcttgcaa

SEQ ID NO: 1634 - DNA, 22 bp, Artificial Sequence
  Synthetic sequence
gtatttttcgtatttcttgcaa

SEQ ID NO: 1635 - DNA, 22 bp, Artificial Sequence
  Synthetic sequence
gtatttttcgtatttcttgcaa

SEQ ID NO: 1636 - DNA, 22 bp, Artificial Sequence
  Synthetic sequence
gtatttttcgtatttcttgcaa

SEQ ID NO: 1637 - DNA, 22 bp, Artificial Sequence
  Synthetic sequence
gtatttttcgtatttcttgcaa

SEQ ID NO: 1638 - DNA, 22 bp, Artificial Sequence
  Synthetic sequence
gtatttttcgtatttcttgcaa

SEQ ID NO: 1639 - DNA, 22 bp, Artificial Sequence
  Synthetic sequence
gtatttttcgtatttcttgcaa

SEQ ID NO: 1640 - DNA, 22 bp, Artificial Sequence
  Synthetic sequence
gtatttttcgtatttcttgcaa

SEQ ID NO: 1641 - DNA, 22 bp, Artificial Sequence
  Synthetic sequence
gtatttttcgtatttcttgcaa

SEQ ID NO: 1642 - DNA, 22 bp, Artificial Sequence
  Synthetic sequence
gtatttttcgtatttcttgcaa

SEQ ID NO: 1643 - DNA, 22 bp, Artificial Sequence
  Synthetic sequence
gtatttttcgtatttcttgcaa

SEQ ID NO: 1644 - DNA, 22 bp, Artificial Sequence
  Synthetic sequence
gtatttttcgtatttcttgcaa

SEQ ID NO: 1645 - DNA, 22 bp, Artificial Sequence
  Synthetic sequence
gtatttttcgtatttcttgcaa

SEQ ID NO: 1646 - DNA, 22 bp, Artificial Sequence
  Synthetic sequence
gtatttttcgtatttcttgcaa

SEQ ID NO: 1647 - DNA, 22 bp, Artificial Sequence
  Synthetic sequence
gtatttttcgtatttcttgcaa

SEQ ID NO: 1648 - DNA, 22 bp, Artificial Sequence
  Synthetic sequence
gtatttttcgtatttcttgcaa

SEQ ID NO: 1649 - DNA, 20 bp, Artificial Sequence
  Synthetic sequence
ctaggtgatgcactgcttta

SEQ ID NO: 1650 - DNA, 20 bp, Artificial Sequence
  Synthetic sequence
ctaggtgatgcactgcttta

SEQ ID NO: 1651 - DNA, 20 bp, Artificial Sequence
  Synthetic sequence
ctaggtgatgcactgcttta

SEQ ID NO: 1652 - DNA, 20 bp, Artificial Sequence
  Synthetic sequence
ctaggtgatgcactgcttta

SEQ ID NO: 1653 - DNA, 20 bp, Artificial Sequence
  Synthetic sequence
ctaggtgatgcactgcttta

SEQ ID NO: 1654 - DNA, 20 bp, Artificial Sequence
  Synthetic sequence
ctaggtgatgcactgcttta

SEQ ID NO: 1655 - DNA, 20 bp, Artificial Sequence
  Synthetic sequence
ctaggtgatgcactgcttta

SEQ ID NO: 1656 - DNA, 20 bp, Artificial Sequence
  Synthetic sequence
ctaggtgatgcactgcttta

SEQ ID NO: 1657 - DNA, 20 bp, Artificial Sequence
  Synthetic sequence
ctaggtgatgcactgcttta

SEQ ID NO: 1658 - DNA, 20 bp, Artificial Sequence
  Synthetic sequence
ctaggtgatgcactgcttta

SEQ ID NO: 1659 - DNA, 20 bp, Artificial Sequence
  Synthetic sequence
ctaggtgatgcactgcttta

SEQ ID NO: 1660 - DNA, 20 bp, Artificial Sequence
  Synthetic sequence
ctaggtgatgcactgcttta

SEQ ID NO: 1661 - DNA, 20 bp, Artificial Sequence
  Synthetic sequence
ctaggtgatgcactgcttta

SEQ ID NO: 1662 - DNA, 20 bp, Artificial Sequence
  Synthetic sequence
ctaggtgatgcactgcttta

SEQ ID NO: 1663 - DNA, 20 bp, Artificial Sequence
  Synthetic sequence
ctaggtgatgcactgcttta

SEQ ID NO: 1664 - DNA, 20 bp, Artificial Sequence
  Synthetic sequence
ctaggtgatgcactgcttta

SEQ ID NO: 1665 - DNA, 20 bp, Artificial Sequence
  Synthetic sequence
ctaggtgatgcactgcttta

SEQ ID NO: 1666 - DNA, 20 bp, Artificial Sequence
  Synthetic sequence
ctaggtgatgcactgcttta

SEQ ID NO: 1667 - DNA, 20 bp, Artificial Sequence
  Synthetic sequence
ctaggtgatgcactgcttta

SEQ ID NO: 1668 - DNA, 20 bp, Artificial Sequence
  Synthetic sequence
ctaggtgatgcactgcttta

SEQ ID NO: 1669 - DNA, 20 bp, Artificial Sequence
  Synthetic sequence
ctaggtgatgcactgcttta

SEQ ID NO: 1670 - DNA, 20 bp, Artificial Sequence
  Synthetic sequence
ctaggtgatgcactgcttta

SEQ ID NO: 1671 - DNA, 19 bp, Artificial Sequence
  Synthetic sequence
ctaggtgatgcactgcttt

SEQ ID NO: 1672 - DNA, 19 bp, Artificial Sequence
  Synthetic sequence
ctaggtgatgcactgcttt

SEQ ID NO: 1673 - DNA, 19 bp, Artificial Sequence
  Synthetic sequence
ctaggtgatgcactgcttt

SEQ ID NO: 1674 - DNA, 19 bp, Artificial Sequence
  Synthetic sequence
ctaggtgatgcactgcttt

SEQ ID NO: 1675 - DNA, 19 bp, Artificial Sequence
  Synthetic sequence
ctaggtgatgcactgcttt

SEQ ID NO: 1676 - DNA, 19 bp, Artificial Sequence
  Synthetic sequence
taggtgatgcactgcttta

SEQ ID NO: 1677 - DNA, 19 bp, Artificial Sequence
  Synthetic sequence
taggtgatgcactgcttta

SEQ ID NO: 1678 - DNA, 19 bp, Artificial Sequence
  Synthetic sequence
taggtgatgcactgcttta

SEQ ID NO: 1679 - DNA, 19 bp, Artificial Sequence
  Synthetic sequence
taggtgatgcactgcttta

SEQ ID NO: 1680 - DNA, 19 bp, Artificial Sequence
  Synthetic sequence
taggtgatgcactgcttta

SEQ ID NO: 1681 - DNA, 20 bp, Artificial Sequence
  Synthetic sequence
ctaggtgatgcactgcttta

SEQ ID NO: 1682 - DNA, 20 bp, Artificial Sequence
  Synthetic sequence
ctaggtgatgcactgcttta

SEQ ID NO: 1683 - DNA, 20 bp, Artificial Sequence
  Synthetic sequence
ctaggtgatgcactgcttta

SEQ ID NO: 1684 - DNA, 20 bp, Artificial Sequence
  Synthetic sequence
ctaggtgatgcactgcttta

SEQ ID NO: 1685 - DNA, 20 bp, Artificial Sequence
  Synthetic sequence
ctaggtgatgcactgcttta

SEQ ID NO: 1686 - DNA, 20 bp, Artificial Sequence
  Synthetic sequence
ctaggtgatgcactgcttta

SEQ ID NO: 1687 - DNA, 20 bp, Artificial Sequence
  Synthetic sequence
ctaggtgatgcactgcttta

SEQ ID NO: 1688 - DNA, 20 bp, Artificial Sequence
  Synthetic sequence
ctaggtgatgcactgcttta

SEQ ID NO: 1689 - DNA, 19 bp, Artificial Sequence
  Synthetic sequence
ctaggtgatgcactgcttt

SEQ ID NO: 1690 - DNA, 19 bp, Artificial Sequence
  Synthetic sequence
ctaggtgatgcactgcttt

SEQ ID NO: 1691 - DNA, 19 bp, Artificial Sequence
  Synthetic sequence
ctaggtgatgcactgcttt

SEQ ID NO: 1692 - DNA, 19 bp, Artificial Sequence
  Synthetic sequence
ctaggtgatgcactgcttt

SEQ ID NO: 1693 - DNA, 20 bp, Artificial Sequence
  Synthetic sequence
ctaggtgatgcactgcttta

SEQ ID NO: 1694 - DNA, 20 bp, Artificial Sequence
  Synthetic sequence
ctaggtgatgcactgcttta

SEQ ID NO: 1695 - DNA, 20 bp, Artificial Sequence
  Synthetic sequence
ctaggtgatgcactgcttta

SEQ ID NO: 1696 - DNA, 18 bp, Artificial Sequence
  Synthetic sequence
ctaggtgatgcactgctt

SEQ ID NO: 1697 - DNA, 18 bp, Artificial Sequence
  Synthetic sequence
ctaggtgatgcactgctt

SEQ ID NO: 1698 - DNA, 18 bp, Artificial Sequence
  Synthetic sequence
ctaggtgatgcactgctt

SEQ ID NO: 1699 - DNA, 18 bp, Artificial Sequence
  Synthetic sequence
ctaggtgatgcactgctt

SEQ ID NO: 1700 - DNA, 18 bp, Artificial Sequence
  Synthetic sequence
aggtgatgcactgcttta

SEQ ID NO: 1701 - DNA, 18 bp, Artificial Sequence
  Synthetic sequence
aggtgatgcactgcttta

SEQ ID NO: 1702 - DNA, 18 bp, Artificial Sequence
  Synthetic sequence
aggtgatgcactgcttta

SEQ ID NO: 1703 - DNA, 18 bp, Artificial Sequence
  Synthetic sequence
aggtgatgcactgcttta

SEQ ID NO: 1704 - DNA, 20 bp, Artificial Sequence
  Synthetic sequence
ctaggtgatgcactgcttta

SEQ ID NO: 1705 - DNA, 20 bp, Artificial Sequence
  Synthetic sequence
ctaggtgatgcactgcttta

SEQ ID NO: 1706 - DNA, 20 bp, Artificial Sequence
  Synthetic sequence
ctaggtgatgcactgcttta

SEQ ID NO: 1707 - DNA, 20 bp, Artificial Sequence
  Synthetic sequence
ctaggtgatgcactgcttta

SEQ ID NO: 1708 - DNA, 20 bp, Artificial Sequence
  Synthetic sequence
ctaggtgatgcactgcttta

SEQ ID NO: 1709 - DNA, 20 bp, Artificial Sequence
  Synthetic sequence
ctaggtgatgcactgcttta

SEQ ID NO: 1710 - DNA, 19 bp, Artificial Sequence
  Synthetic sequence
ctaggtgatgcactgcttt

SEQ ID NO: 1711 - DNA, 19 bp, Artificial Sequence
  Synthetic sequence
ctaggtgatgcactgcttt

SEQ ID NO: 1712 - DNA, 19 bp, Artificial Sequence
  Synthetic sequence
ctaggtgatgcactgcttt

SEQ ID NO: 1713 - DNA, 19 bp, Artificial Sequence
  Synthetic sequence
taggtgatgcactgcttta

SEQ ID NO: 1714 - DNA, 19 bp, Artificial Sequence
  Synthetic sequence
taggtgatgcactgcttta

SEQ ID NO: 1715 - DNA, 19 bp, Artificial Sequence
  Synthetic sequence
taggtgatgcactgcttta

SEQ ID NO: 1716 - DNA, 18 bp, Artificial Sequence
  Synthetic sequence
ctaggtgatgcactgctt

SEQ ID NO: 1717 - DNA, 18 bp, Artificial Sequence
  Synthetic sequence
ctaggtgatgcactgctt

SEQ ID NO: 1718 - DNA, 18 bp, Artificial Sequence
  Synthetic sequence
ctaggtgatgcactgctt

SEQ ID NO: 1719 - DNA, 18 bp, Artificial Sequence
  Synthetic sequence
aggtgatgcactgcttta

SEQ ID NO: 1720 - DNA, 18 bp, Artificial Sequence
  Synthetic sequence
aggtgatgcactgcttta

SEQ ID NO: 1721 - DNA, 18 bp, Artificial Sequence
  Synthetic sequence
aggtgatgcactgcttta

SEQ ID NO: 1722 - DNA, 17 bp, Artificial Sequence
  Synthetic sequence
ctaggtgatgcactgct

SEQ ID NO: 1723 - DNA, 17 bp, Artificial Sequence
  Synthetic sequence
ctaggtgatgcactgct

SEQ ID NO: 1724 - DNA, 17 bp, Artificial Sequence
  Synthetic sequence
ctaggtgatgcactgct

SEQ ID NO: 1725 - DNA, 17 bp, Artificial Sequence
  Synthetic sequence
ggtgatgcactgcttta

SEQ ID NO: 1726 - DNA, 17 bp, Artificial Sequence
  Synthetic sequence
ggtgatgcactgcttta

SEQ ID NO: 1727 - DNA, 17 bp, Artificial Sequence
  Synthetic sequence
ggtgatgcactgcttta

SEQ ID NO: 1728 - DNA, 19 bp, Artificial Sequence
  Synthetic sequence
taggtgatgcactgcttta

SEQ ID NO: 1729 - DNA, 19 bp, Artificial Sequence
  Synthetic sequence
taggtgatgcactgcttta

SEQ ID NO: 1730 - DNA, 19 bp, Artificial Sequence
  Synthetic sequence
ctaggtgatgcactgcttt

SEQ ID NO: 1731 - DNA, 19 bp, Artificial Sequence
  Synthetic sequence
ctaggtgatgcactgcttt

SEQ ID NO: 1732 - DNA, 18 bp, Artificial Sequence
  Synthetic sequence
taggtgatgcactgcttt

SEQ ID NO: 1733 - DNA, 18 bp, Artificial Sequence
  Synthetic sequence
taggtgatgcactgcttt

SEQ ID NO: 1734 - DNA, 18 bp, Artificial Sequence
  Synthetic sequence
taggtgatgcactgcttt

SEQ ID NO: 1735 - DNA, 18 bp, Artificial Sequence
  Synthetic sequence
taggtgatgcactgcttt

SEQ ID NO: 1736 - DNA, 17 bp, Artificial Sequence
  Synthetic sequence
taggtgatgcactgctt

SEQ ID NO: 1737 - DNA, 17 bp, Artificial Sequence
  Synthetic sequence
taggtgatgcactgctt

SEQ ID NO: 1738 - DNA, 17 bp, Artificial Sequence
  Synthetic sequence
taggtgatgcactgctt

SEQ ID NO: 1739 - DNA, 20 bp, Artificial Sequence
  Synthetic sequence
ctaggtgatgcactgcttta

SEQ ID NO: 1740 - DNA, 20 bp, Artificial Sequence
  Synthetic sequence
ctaggtgatgcactgcttta

SEQ ID NO: 1741 - DNA, 20 bp, Artificial Sequence
  Synthetic sequence
ctaggtgatgcactgcttta

SEQ ID NO: 1742 - DNA, 20 bp, Artificial Sequence
  Synthetic sequence
ctaggtgatgcactgcttta

SEQ ID NO: 1743 - DNA, 19 bp, Artificial Sequence
  Synthetic sequence
ctaggtgatgcactgcttt

SEQ ID NO: 1744 - DNA, 19 bp, Artificial Sequence
  Synthetic sequence
taggtgatgcactgcttta

SEQ ID NO: 1745 - DNA, 20 bp, Artificial Sequence
  Synthetic sequence
ctaggtgatgcactgcttta

SEQ ID NO: 1746 - DNA, 20 bp, Artificial Sequence
  Synthetic sequence
ctaggtgatgcactgcttta

SEQ ID NO: 1747 - DNA, 19 bp, Artificial Sequence
  Synthetic sequence
ctaggtgatgcactgcttt

SEQ ID NO: 1748 - DNA, 20 bp, Artificial Sequence
  Synthetic sequence
ctaggtgatgcactgcttta

SEQ ID NO: 1749 - DNA, 18 bp, Artificial Sequence
  Synthetic sequence
ctaggtgatgcactgctt

SEQ ID NO: 1750 - DNA, 18 bp, Artificial Sequence
  Synthetic sequence
aggtgatgcactgcttta

SEQ ID NO: 1751 - DNA, 20 bp, Artificial Sequence
  Synthetic sequence
ctaggtgatgcactgcttta

SEQ ID NO: 1752 - DNA, 19 bp, Artificial Sequence
  Synthetic sequence
ctaggtgatgcactgcttt

SEQ ID NO: 1753 - DNA, 18 bp, Artificial Sequence
  Synthetic sequence
ctaggtgatgcactgctt

SEQ ID NO: 1754 - DNA, 18 bp, Artificial Sequence
  Synthetic sequence
aggtgatgcactgcttta

SEQ ID NO: 1755 - DNA, 17 bp, Artificial Sequence
  Synthetic sequence
ctaggtgatgcactgct

SEQ ID NO: 1756 - DNA, 17 bp, Artificial Sequence
  Synthetic sequence
ggtgatgcactgcttta

SEQ ID NO: 1757 - DNA, 19 bp, Artificial Sequence
  Synthetic sequence
taggtgatgcactgcttta

SEQ ID NO: 1758 - DNA, 18 bp, Artificial Sequence
  Synthetic sequence
taggtgatgcactgcttt

SEQ ID NO: 1759 - DNA, 17 bp, Artificial Sequence
  Synthetic sequence
taggtgatgcactgctt

SEQ ID NO: 1760 - DNA, 20 bp, Artificial Sequence
  Synthetic sequence
ctaggtgatgcactgcttta

SEQ ID NO: 1761 - DNA, 20 bp, Artificial Sequence
  Synthetic sequence
ctaggtgatgcactgcttta

SEQ ID NO: 1762 - DNA, 20 bp, Artificial Sequence
  Synthetic sequence
ctaggtgatgcactgcttta

SEQ ID NO: 1763 - DNA, 20 bp, Artificial Sequence
  Synthetic sequence
ctaggtgatgcactgcttta

SEQ ID NO: 1764 - DNA, 20 bp, Artificial Sequence
  Synthetic sequence
ctaggtgatgcactgcttta

SEQ ID NO: 1765 - DNA, 20 bp, Artificial Sequence
  Synthetic sequence
ctaggtgatgcactgcttta

SEQ ID NO: 1766 - DNA, 20 bp, Artificial Sequence
  Synthetic sequence
ctaggtgatgcactgcttta

SEQ ID NO: 1767 - DNA, 20 bp, Artificial Sequence
  Synthetic sequence
ctaggtgatgcactgcttta

SEQ ID NO: 1768 - DNA, 20 bp, Artificial Sequence
  Synthetic sequence
ctaggtgatgcactgcttta

SEQ ID NO: 1769 - DNA, 20 bp, Artificial Sequence
  Synthetic sequence
ctaggtgatgcactgcttta

SEQ ID NO: 1770 - DNA, 20 bp, Artificial Sequence
  Synthetic sequence
ctaggtgatgcactgcttta

SEQ ID NO: 1771 - DNA, 20 bp, Artificial Sequence
  Synthetic sequence
ctaggtgatgcactgcttta

SEQ ID NO: 1772 - DNA, 20 bp, Artificial Sequence
  Synthetic sequence
ctaggtgatgcactgcttta

SEQ ID NO: 1773 - DNA, 20 bp, Artificial Sequence
  Synthetic sequence
ctaggtgatgcactgcttta

SEQ ID NO: 1774 - DNA, 20 bp, Artificial Sequence
  Synthetic sequence
ctaggtgatgcactgcttta

SEQ ID NO: 1775 - DNA, 21 bp, Artificial Sequence
  Synthetic sequence
ctaggtgatgcactgctttac

SEQ ID NO: 1776 - DNA, 21 bp, Artificial Sequence
  Synthetic sequence
ctaggtgatgcactgctttac

SEQ ID NO: 1777 - DNA, 21 bp, Artificial Sequence
  Synthetic sequence
ctaggtgatgcactgctttac

SEQ ID NO: 1778 - DNA, 21 bp, Artificial Sequence
  Synthetic sequence
ctaggtgatgcactgctttac

SEQ ID NO: 1779 - DNA, 21 bp, Artificial Sequence
  Synthetic sequence
ctaggtgatgcactgctttac

SEQ ID NO: 1780 - DNA, 21 bp, Artificial Sequence
  Synthetic sequence
ctaggtgatgcactgctttac

SEQ ID NO: 1781 - DNA, 21 bp, Artificial Sequence
  Synthetic sequence
ctaggtgatgcactgctttac

SEQ ID NO: 1782 - DNA, 21 bp, Artificial Sequence
  Synthetic sequence
ctaggtgatgcactgctttac

SEQ ID NO: 1783 - DNA, 21 bp, Artificial Sequence
  Synthetic sequence
ctaggtgatgcactgctttac

SEQ ID NO: 1784 - DNA, 21 bp, Artificial Sequence
  Synthetic sequence
ctaggtgatgcactgctttac

SEQ ID NO: 1785 - DNA, 21 bp, Artificial Sequence
  Synthetic sequence
ctaggtgatgcactgctttac

SEQ ID NO: 1786 - DNA, 21 bp, Artificial Sequence
  Synthetic sequence
ctaggtgatgcactgctttac

SEQ ID NO: 1787 - DNA, 21 bp, Artificial Sequence
  Synthetic sequence
ctaggtgatgcactgctttac

SEQ ID NO: 1788 - DNA, 21 bp, Artificial Sequence
  Synthetic sequence
ctaggtgatgcactgctttac

SEQ ID NO: 1789 - DNA, 21 bp, Artificial Sequence
  Synthetic sequence
ctaggtgatgcactgctttac

SEQ ID NO: 1790 - DNA, 21 bp, Artificial Sequence
  Synthetic sequence
ctaggtgatgcactgctttac

SEQ ID NO: 1791 - DNA, 22 bp, Artificial Sequence
  Synthetic sequence
ctaggtgatgcactgctttaca

SEQ ID NO: 1792 - DNA, 22 bp, Artificial Sequence
  Synthetic sequence
ctaggtgatgcactgctttaca

SEQ ID NO: 1793 - DNA, 22 bp, Artificial Sequence
  Synthetic sequence
ctaggtgatgcactgctttaca

SEQ ID NO: 1794 - DNA, 22 bp, Artificial Sequence
  Synthetic sequence
ctaggtgatgcactgctttaca

SEQ ID NO: 1795 - DNA, 22 bp, Artificial Sequence
  Synthetic sequence
ctaggtgatgcactgctttaca

SEQ ID NO: 1796 - DNA, 22 bp, Artificial Sequence
  Synthetic sequence
ctaggtgatgcactgctttaca

SEQ ID NO: 1797 - DNA, 22 bp, Artificial Sequence
  Synthetic sequence
ctaggtgatgcactgctttaca

SEQ ID NO: 1798 - DNA, 22 bp, Artificial Sequence
  Synthetic sequence
ctaggtgatgcactgctttaca

SEQ ID NO: 1799 - DNA, 22 bp, Artificial Sequence
  Synthetic sequence
ctaggtgatgcactgctttaca

SEQ ID NO: 1800 - DNA, 22 bp, Artificial Sequence
  Synthetic sequence
ctaggtgatgcactgctttaca

SEQ ID NO: 1801 - DNA, 22 bp, Artificial Sequence
  Synthetic sequence
ctaggtgatgcactgctttaca

SEQ ID NO: 1802 - DNA, 22 bp, Artificial Sequence
  Synthetic sequence
ctaggtgatgcactgctttaca

SEQ ID NO: 1803 - DNA, 22 bp, Artificial Sequence
  Synthetic sequence
ctaggtgatgcactgctttaca

SEQ ID NO: 1804 - DNA, 22 bp, Artificial Sequence
  Synthetic sequence
ctaggtgatgcactgctttaca

SEQ ID NO: 1805 - DNA, 22 bp, Artificial Sequence
  Synthetic sequence
ctaggtgatgcactgctttaca

SEQ ID NO: 1806 - DNA, 22 bp, Artificial Sequence
  Synthetic sequence
ctaggtgatgcactgctttaca

SEQ ID NO: 1807 - DNA, 23 bp, Artificial Sequence
  Synthetic sequence
ctaggtgatgcactgctttacac

SEQ ID NO: 1808 - DNA, 23 bp, Artificial Sequence
  Synthetic sequence
ctaggtgatgcactgctttacac

SEQ ID NO: 1809 - DNA, 23 bp, Artificial Sequence
  Synthetic sequence
ctaggtgatgcactgctttacac

SEQ ID NO: 1810 - DNA, 23 bp, Artificial Sequence
  Synthetic sequence
ctaggtgatgcactgctttacac

SEQ ID NO: 1811 - DNA, 23 bp, Artificial Sequence
  Synthetic sequence
ctaggtgatgcactgctttacac

SEQ ID NO: 1812 - DNA, 23 bp, Artificial Sequence
  Synthetic sequence
ctaggtgatgcactgctttacac

SEQ ID NO: 1813 - DNA, 23 bp, Artificial Sequence
  Synthetic sequence
ctaggtgatgcactgctttacac

SEQ ID NO: 1814 - DNA, 23 bp, Artificial Sequence
  Synthetic sequence
ctaggtgatgcactgctttacac

SEQ ID NO: 1815 - DNA, 23 bp, Artificial Sequence
  Synthetic sequence
ctaggtgatgcactgctttacac

SEQ ID NO: 1816 - DNA, 23 bp, Artificial Sequence
  Synthetic sequence
ctaggtgatgcactgctttacac

SEQ ID NO: 1817 - DNA, 23 bp, Artificial Sequence
  Synthetic sequence
ctaggtgatgcactgctttacac

SEQ ID NO: 1818 - DNA, 23 bp, Artificial Sequence
  Synthetic sequence
ctaggtgatgcactgctttacac

SEQ ID NO: 1819 - DNA, 23 bp, Artificial Sequence
  Synthetic sequence
ctaggtgatgcactgctttacac

SEQ ID NO: 1820 - DNA, 23 bp, Artificial Sequence
  Synthetic sequence
ctaggtgatgcactgctttacac

SEQ ID NO: 1821 - DNA, 23 bp, Artificial Sequence
  Synthetic sequence
ctaggtgatgcactgctttacac

SEQ ID NO: 1822 - DNA, 23 bp, Artificial Sequence
  Synthetic sequence
ctaggtgatgcactgctttacac

SEQ ID NO: 1823 - DNA, 21 bp, Artificial Sequence
  Synthetic sequence
ctaggtgatgcactgctttac

SEQ ID NO: 1824 - DNA, 21 bp, Artificial Sequence
  Synthetic sequence
ctaggtgatgcactgctttac

SEQ ID NO: 1825 - DNA, 21 bp, Artificial Sequence
  Synthetic sequence
ctaggtgatgcactgctttac

SEQ ID NO: 1826 - DNA, 21 bp, Artificial Sequence
  Synthetic sequence
ctaggtgatgcactgctttac

SEQ ID NO: 1827 - DNA, 21 bp, Artificial Sequence
  Synthetic sequence
ctaggtgatgcactgctttac

SEQ ID NO: 1828 - DNA, 21 bp, Artificial Sequence
  Synthetic sequence
ctaggtgatgcactgctttac

SEQ ID NO: 1829 - DNA, 21 bp, Artificial Sequence
  Synthetic sequence
ctaggtgatgcactgctttac

SEQ ID NO: 1830 - DNA, 21 bp, Artificial Sequence
  Synthetic sequence
ctaggtgatgcactgctttac

SEQ ID NO: 1831 - DNA, 21 bp, Artificial Sequence
  Synthetic sequence
ctaggtgatgcactgctttac

SEQ ID NO: 1832 - DNA, 21 bp, Artificial Sequence
  Synthetic sequence
ctaggtgatgcactgctttac

SEQ ID NO: 1833 - DNA, 21 bp, Artificial Sequence
  Synthetic sequence
ctaggtgatgcactgctttac

SEQ ID NO: 1834 - DNA, 21 bp, Artificial Sequence
  Synthetic sequence
ctaggtgatgcactgctttac

SEQ ID NO: 1835 - DNA, 21 bp, Artificial Sequence
  Synthetic sequence
ctaggtgatgcactgctttac

SEQ ID NO: 1836 - DNA, 21 bp, Artificial Sequence
  Synthetic sequence
ctaggtgatgcactgctttac

SEQ ID NO: 1837 - DNA, 21 bp, Artificial Sequence
  Synthetic sequence
ctaggtgatgcactgctttac

SEQ ID NO: 1838 - DNA, 21 bp, Artificial Sequence
  Synthetic sequence
ctaggtgatgcactgctttac

SEQ ID NO: 1839 - DNA, 22 bp, Artificial Sequence
  Synthetic sequence
ctaggtgatgcactgctttaca

SEQ ID NO: 1840 - DNA, 22 bp, Artificial Sequence
  Synthetic sequence
ctaggtgatgcactgctttaca

SEQ ID NO: 1841 - DNA, 22 bp, Artificial Sequence
  Synthetic sequence
ctaggtgatgcactgctttaca

SEQ ID NO: 1842 - DNA, 22 bp, Artificial Sequence
  Synthetic sequence
ctaggtgatgcactgctttaca

SEQ ID NO: 1843 - DNA, 22 bp, Artificial Sequence
  Synthetic sequence
ctaggtgatgcactgctttaca

SEQ ID NO: 1844 - DNA, 22 bp, Artificial Sequence
  Synthetic sequence
ctaggtgatgcactgctttaca

SEQ ID NO: 1845 - DNA, 22 bp, Artificial Sequence
  Synthetic sequence
ctaggtgatgcactgctttaca

SEQ ID NO: 1846 - DNA, 22 bp, Artificial Sequence
  Synthetic sequence
ctaggtgatgcactgctttaca

SEQ ID NO: 1847 - DNA, 22 bp, Artificial Sequence
  Synthetic sequence
ctaggtgatgcactgctttaca

SEQ ID NO: 1848 - DNA, 22 bp, Artificial Sequence
  Synthetic sequence
ctaggtgatgcactgctttaca

SEQ ID NO: 1849 - DNA, 22 bp, Artificial Sequence
  Synthetic sequence
ctaggtgatgcactgctttaca

SEQ ID NO: 1850 - DNA, 22 bp, Artificial Sequence
  Synthetic sequence
ctaggtgatgcactgctttaca

SEQ ID NO: 1851 - DNA, 22 bp, Artificial Sequence
  Synthetic sequence
ctaggtgatgcactgctttaca

SEQ ID NO: 1852 - DNA, 22 bp, Artificial Sequence
  Synthetic sequence
ctaggtgatgcactgctttaca

SEQ ID NO: 1853 - DNA, 22 bp, Artificial Sequence
  Synthetic sequence
ctaggtgatgcactgctttaca

SEQ ID NO: 1854 - DNA, 22 bp, Artificial Sequence
  Synthetic sequence
ctaggtgatgcactgctttaca

SEQ ID NO: 1855 - DNA, 20 bp, Artificial Sequence
  Synthetic sequence
gctaggtgatgcactgcttt

SEQ ID NO: 1856 - DNA, 20 bp, Artificial Sequence
  Synthetic sequence
gctaggtgatgcactgcttt

SEQ ID NO: 1857 - DNA, 20 bp, Artificial Sequence
  Synthetic sequence
gctaggtgatgcactgcttt

SEQ ID NO: 1858 - DNA, 20 bp, Artificial Sequence
  Synthetic sequence
gctaggtgatgcactgcttt

SEQ ID NO: 1859 - DNA, 20 bp, Artificial Sequence
  Synthetic sequence
gctaggtgatgcactgcttt

SEQ ID NO: 1860 - DNA, 20 bp, Artificial Sequence
  Synthetic sequence
gctaggtgatgcactgcttt

SEQ ID NO: 1861 - DNA, 20 bp, Artificial Sequence
  Synthetic sequence
gctaggtgatgcactgcttt

SEQ ID NO: 1862 - DNA, 20 bp, Artificial Sequence
  Synthetic sequence
gctaggtgatgcactgcttt

SEQ ID NO: 1863 - DNA, 20 bp, Artificial Sequence
  Synthetic sequence
gctaggtgatgcactgcttt

SEQ ID NO: 1864 - DNA, 20 bp, Artificial Sequence
  Synthetic sequence
gctaggtgatgcactgcttt

SEQ ID NO: 1865 - DNA, 20 bp, Artificial Sequence
  Synthetic sequence
gctaggtgatgcactgcttt

SEQ ID NO: 1866 - DNA, 20 bp, Artificial Sequence
  Synthetic sequence
gctaggtgatgcactgcttt

SEQ ID NO: 1867 - DNA, 20 bp, Artificial Sequence
  Synthetic sequence
gctaggtgatgcactgcttt

SEQ ID NO: 1868 - DNA, 20 bp, Artificial Sequence
  Synthetic sequence
gctaggtgatgcactgcttt

SEQ ID NO: 1869 - DNA, 20 bp, Artificial Sequence
  Synthetic sequence
gctaggtgatgcactgcttt

SEQ ID NO: 1870 - DNA, 20 bp, Artificial Sequence
  Synthetic sequence
gctaggtgatgcactgcttt

SEQ ID NO: 1871 - DNA, 20 bp, Artificial Sequence
  Synthetic sequence
gctaggtgatgcactgcttt

SEQ ID NO: 1872 - DNA, 20 bp, Artificial Sequence
  Synthetic sequence
gctaggtgatgcactgcttt

SEQ ID NO: 1873 - DNA, 20 bp, Artificial Sequence
  Synthetic sequence
gctaggtgatgcactgcttt

SEQ ID NO: 1874 - DNA, 20 bp, Artificial Sequence
  Synthetic sequence
gctaggtgatgcactgcttt

SEQ ID NO: 1875 - DNA, 20 bp, Artificial Sequence
  Synthetic sequence
gctaggtgatgcactgcttt

SEQ ID NO: 1876 - DNA, 20 bp, Artificial Sequence
  Synthetic sequence
gctaggtgatgcactgcttt

SEQ ID NO: 1877 - DNA, 19 bp, Artificial Sequence
  Synthetic sequence
gctaggtgatgcactgctt

SEQ ID NO: 1878 - DNA, 19 bp, Artificial Sequence
  Synthetic sequence
gctaggtgatgcactgctt

SEQ ID NO: 1879 - DNA, 19 bp, Artificial Sequence
  Synthetic sequence
gctaggtgatgcactgctt

SEQ ID NO: 1880 - DNA, 19 bp, Artificial Sequence
  Synthetic sequence
gctaggtgatgcactgctt

SEQ ID NO: 1881 - DNA, 19 bp, Artificial Sequence
  Synthetic sequence
gctaggtgatgcactgctt

SEQ ID NO: 1882 - DNA, 19 bp, Artificial Sequence
  Synthetic sequence
ctaggtgatgcactgcttt

SEQ ID NO: 1883 - DNA, 19 bp, Artificial Sequence
  Synthetic sequence
ctaggtgatgcactgcttt

SEQ ID NO: 1884 - DNA, 19 bp, Artificial Sequence
  Synthetic sequence
ctaggtgatgcactgcttt

SEQ ID NO: 1885 - DNA, 19 bp, Artificial Sequence
  Synthetic sequence
ctaggtgatgcactgcttt

SEQ ID NO: 1886 - DNA, 19 bp, Artificial Sequence
  Synthetic sequence
ctaggtgatgcactgcttt

SEQ ID NO: 1887 - DNA, 20 bp, Artificial Sequence
  Synthetic sequence
gctaggtgatgcactgcttt

SEQ ID NO: 1888 - DNA, 20 bp, Artificial Sequence
  Synthetic sequence
gctaggtgatgcactgcttt

SEQ ID NO: 1889 - DNA, 20 bp, Artificial Sequence
  Synthetic sequence
gctaggtgatgcactgcttt

SEQ ID NO: 1890 - DNA, 20 bp, Artificial Sequence
  Synthetic sequence
gctaggtgatgcactgcttt

SEQ ID NO: 1891 - DNA, 20 bp, Artificial Sequence
  Synthetic sequence
gctaggtgatgcactgcttt

SEQ ID NO: 1892 - DNA, 20 bp, Artificial Sequence
  Synthetic sequence
gctaggtgatgcactgcttt

SEQ ID NO: 1893 - DNA, 20 bp, Artificial Sequence
  Synthetic sequence
gctaggtgatgcactgcttt

SEQ ID NO: 1894 - DNA, 20 bp, Artificial Sequence
  Synthetic sequence
gctaggtgatgcactgcttt

SEQ ID NO: 1895 - DNA, 19 bp, Artificial Sequence
  Synthetic sequence
gctaggtgatgcactgctt

SEQ ID NO: 1896 - DNA, 19 bp, Artificial Sequence
  Synthetic sequence
gctaggtgatgcactgctt

SEQ ID NO: 1897 - DNA, 19 bp, Artificial Sequence
  Synthetic sequence
gctaggtgatgcactgctt

SEQ ID NO: 1898 - DNA, 19 bp, Artificial Sequence
  Synthetic sequence
gctaggtgatgcactgctt

SEQ ID NO: 1899 - DNA, 20 bp, Artificial Sequence
  Synthetic sequence
gctaggtgatgcactgcttt

SEQ ID NO: 1900 - DNA, 20 bp, Artificial Sequence
  Synthetic sequence
gctaggtgatgcactgcttt

SEQ ID NO: 1901 - DNA, 20 bp, Artificial Sequence
  Synthetic sequence
gctaggtgatgcactgcttt

SEQ ID NO: 1902 - DNA, 18 bp, Artificial Sequence
  Synthetic sequence
gctaggtgatgcactgct

SEQ ID NO: 1903 - DNA, 18 bp, Artificial Sequence
  Synthetic sequence
gctaggtgatgcactgct

SEQ ID NO: 1904 - DNA, 18 bp, Artificial Sequence
  Synthetic sequence
gctaggtgatgcactgct

SEQ ID NO: 1905 - DNA, 18 bp, Artificial Sequence
  Synthetic sequence
gctaggtgatgcactgct

SEQ ID NO: 1906 - DNA, 18 bp, Artificial Sequence
  Synthetic sequence
taggtgatgcactgcttt

SEQ ID NO: 1907 - DNA, 18 bp, Artificial Sequence
  Synthetic sequence
taggtgatgcactgcttt

SEQ ID NO: 1908 - DNA, 18 bp, Artificial Sequence
  Synthetic sequence
taggtgatgcactgcttt

SEQ ID NO: 1909 - DNA, 18 bp, Artificial Sequence
  Synthetic sequence
taggtgatgcactgcttt

SEQ ID NO: 1910 - DNA, 20 bp, Artificial Sequence
  Synthetic sequence
gctaggtgatgcactgcttt

SEQ ID NO: 1911 - DNA, 20 bp, Artificial Sequence
  Synthetic sequence
gctaggtgatgcactgcttt

SEQ ID NO: 1912 - DNA, 20 bp, Artificial Sequence
  Synthetic sequence
gctaggtgatgcactgcttt

SEQ ID NO: 1913 - DNA, 20 bp, Artificial Sequence
  Synthetic sequence
gctaggtgatgcactgcttt

SEQ ID NO: 1914 - DNA, 20 bp, Artificial Sequence
  Synthetic sequence
gctaggtgatgcactgcttt

SEQ ID NO: 1915 - DNA, 20 bp, Artificial Sequence
  Synthetic sequence
gctaggtgatgcactgcttt

SEQ ID NO: 1916 - DNA, 19 bp, Artificial Sequence
  Synthetic sequence
gctaggtgatgcactgctt

SEQ ID NO: 1917 - DNA, 19 bp, Artificial Sequence
  Synthetic sequence
gctaggtgatgcactgctt

SEQ ID NO: 1918 - DNA, 19 bp, Artificial Sequence
  Synthetic sequence
gctaggtgatgcactgctt

SEQ ID NO: 1919 - DNA, 19 bp, Artificial Sequence
  Synthetic sequence
ctaggtgatgcactgcttt

SEQ ID NO: 1920 - DNA, 19 bp, Artificial Sequence
  Synthetic sequence
ctaggtgatgcactgcttt

SEQ ID NO: 1921 - DNA, 19 bp, Artificial Sequence
  Synthetic sequence
ctaggtgatgcactgcttt

SEQ ID NO: 1922 - DNA, 18 bp, Artificial Sequence
  Synthetic sequence
gctaggtgatgcactgct

SEQ ID NO: 1923 - DNA, 18 bp, Artificial Sequence
  Synthetic sequence
gctaggtgatgcactgct

SEQ ID NO: 1924 - DNA, 18 bp, Artificial Sequence
  Synthetic sequence
gctaggtgatgcactgct

SEQ ID NO: 1925 - DNA, 18 bp, Artificial Sequence
  Synthetic sequence
taggtgatgcactgcttt

SEQ ID NO: 1926 - DNA, 18 bp, Artificial Sequence
  Synthetic sequence
taggtgatgcactgcttt

SEQ ID NO: 1927 - DNA, 18 bp, Artificial Sequence
  Synthetic sequence
taggtgatgcactgcttt

SEQ ID NO: 1928 - DNA, 17 bp, Artificial Sequence
  Synthetic sequence
gctaggtgatgcactgc

SEQ ID NO: 1929 - DNA, 17 bp, Artificial Sequence
  Synthetic sequence
gctaggtgatgcactgc

SEQ ID NO: 1930 - DNA, 17 bp, Artificial Sequence
  Synthetic sequence
gctaggtgatgcactgc

SEQ ID NO: 1931 - DNA, 17 bp, Artificial Sequence
  Synthetic sequence
aggtgatgcactgcttt

SEQ ID NO: 1932 - DNA, 17 bp, Artificial Sequence
  Synthetic sequence
aggtgatgcactgcttt

SEQ ID NO: 1933 - DNA, 17 bp, Artificial Sequence
  Synthetic sequence
aggtgatgcactgcttt

SEQ ID NO: 1934 - DNA, 19 bp, Artificial Sequence
  Synthetic sequence
ctaggtgatgcactgcttt

SEQ ID NO: 1935 - DNA, 19 bp, Artificial Sequence
  Synthetic sequence
ctaggtgatgcactgcttt

SEQ ID NO: 1936 - DNA, 19 bp, Artificial Sequence
  Synthetic sequence
gctaggtgatgcactgctt

SEQ ID NO: 1937 - DNA, 19 bp, Artificial Sequence
  Synthetic sequence
gctaggtgatgcactgctt

SEQ ID NO: 1938 - DNA, 18 bp, Artificial Sequence
  Synthetic sequence
ctaggtgatgcactgctt

SEQ ID NO: 1939 - DNA, 18 bp, Artificial Sequence
  Synthetic sequence
ctaggtgatgcactgctt

SEQ ID NO: 1940 - DNA, 18 bp, Artificial Sequence
  Synthetic sequence
ctaggtgatgcactgctt

SEQ ID NO: 1941 - DNA, 18 bp, Artificial Sequence
  Synthetic sequence
ctaggtgatgcactgctt

SEQ ID NO: 1942 - DNA, 17 bp, Artificial Sequence
  Synthetic sequence
ctaggtgatgcactgct

SEQ ID NO: 1943 - DNA, 17 bp, Artificial Sequence
  Synthetic sequence
ctaggtgatgcactgct

SEQ ID NO: 1944 - DNA, 17 bp, Artificial Sequence
  Synthetic sequence
ctaggtgatgcactgct

SEQ ID NO: 1945 - DNA, 20 bp, Artificial Sequence
  Synthetic sequence
gctaggtgatgcactgcttt

SEQ ID NO: 1946 - DNA, 20 bp, Artificial Sequence
  Synthetic sequence
gctaggtgatgcactgcttt

SEQ ID NO: 1947 - DNA, 20 bp, Artificial Sequence
  Synthetic sequence
gctaggtgatgcactgcttt

SEQ ID NO: 1948 - DNA, 20 bp, Artificial Sequence
  Synthetic sequence
gctaggtgatgcactgcttt

SEQ ID NO: 1949 - DNA, 19 bp, Artificial Sequence
  Synthetic sequence
gctaggtgatgcactgctt

SEQ ID NO: 1950 - DNA, 19 bp, Artificial Sequence
  Synthetic sequence
ctaggtgatgcactgcttt

SEQ ID NO: 1951 - DNA, 20 bp, Artificial Sequence
  Synthetic sequence
gctaggtgatgcactgcttt

SEQ ID NO: 1952 - DNA, 20 bp, Artificial Sequence
  Synthetic sequence
gctaggtgatgcactgcttt

SEQ ID NO: 1953 - DNA, 19 bp, Artificial Sequence
  Synthetic sequence
gctaggtgatgcactgctt

SEQ ID NO: 1954 - DNA, 20 bp, Artificial Sequence
  Synthetic sequence
gctaggtgatgcactgcttt

SEQ ID NO: 1955 - DNA, 18 bp, Artificial Sequence
  Synthetic sequence
gctaggtgatgcactgct

SEQ ID NO: 1956 - DNA, 18 bp, Artificial Sequence
  Synthetic sequence
taggtgatgcactgcttt

SEQ ID NO: 1957 - DNA, 20 bp, Artificial Sequence
  Synthetic sequence
gctaggtgatgcactgcttt

SEQ ID NO: 1958 - DNA, 19 bp, Artificial Sequence
  Synthetic sequence
gctaggtgatgcactgctt

SEQ ID NO: 1959 - DNA, 18 bp, Artificial Sequence
  Synthetic sequence
gctaggtgatgcactgct

SEQ ID NO: 1960 - DNA, 18 bp, Artificial Sequence
  Synthetic sequence
taggtgatgcactgcttt

SEQ ID NO: 1961 - DNA, 17 bp, Artificial Sequence
  Synthetic sequence
gctaggtgatgcactgc

SEQ ID NO: 1962 - DNA, 17 bp, Artificial Sequence
  Synthetic sequence
aggtgatgcactgcttt

SEQ ID NO: 1963 - DNA, 19 bp, Artificial Sequence
  Synthetic sequence
ctaggtgatgcactgcttt

SEQ ID NO: 1964 - DNA, 18 bp, Artificial Sequence
  Synthetic sequence
ctaggtgatgcactgctt

SEQ ID NO: 1965 - DNA, 17 bp, Artificial Sequence
  Synthetic sequence
ctaggtgatgcactgct

SEQ ID NO: 1966 - DNA, 20 bp, Artificial Sequence
  Synthetic sequence
gctaggtgatgcactgcttt

SEQ ID NO: 1967 - DNA, 20 bp, Artificial Sequence
  Synthetic sequence
gctaggtgatgcactgcttt

SEQ ID NO: 1968 - DNA, 20 bp, Artificial Sequence
  Synthetic sequence
gctaggtgatgcactgcttt

SEQ ID NO: 1969 - DNA, 20 bp, Artificial Sequence
  Synthetic sequence
gctaggtgatgcactgcttt

SEQ ID NO: 1970 - DNA, 20 bp, Artificial Sequence
  Synthetic sequence
gctaggtgatgcactgcttt

SEQ ID NO: 1971 - DNA, 20 bp, Artificial Sequence
  Synthetic sequence
gctaggtgatgcactgcttt

SEQ ID NO: 1972 - DNA, 20 bp, Artificial Sequence
  Synthetic sequence
gctaggtgatgcactgcttt

SEQ ID NO: 1973 - DNA, 20 bp, Artificial Sequence
  Synthetic sequence
gctaggtgatgcactgcttt

SEQ ID NO: 1974 - DNA, 20 bp, Artificial Sequence
  Synthetic sequence
gctaggtgatgcactgcttt

SEQ ID NO: 1975 - DNA, 20 bp, Artificial Sequence
  Synthetic sequence
gctaggtgatgcactgcttt

SEQ ID NO: 1976 - DNA, 20 bp, Artificial Sequence
  Synthetic sequence
gctaggtgatgcactgcttt

SEQ ID NO: 1977 - DNA, 20 bp, Artificial Sequence
  Synthetic sequence
gctaggtgatgcactgcttt

SEQ ID NO: 1978 - DNA, 20 bp, Artificial Sequence
  Synthetic sequence
gctaggtgatgcactgcttt

SEQ ID NO: 1979 - DNA, 20 bp, Artificial Sequence
  Synthetic sequence
gctaggtgatgcactgcttt

SEQ ID NO: 1980 - DNA, 20 bp, Artificial Sequence
  Synthetic sequence
gctaggtgatgcactgcttt

SEQ ID NO: 1981 - DNA, 21 bp, Artificial Sequence
  Synthetic sequence
gctaggtgatgcactgcttta

SEQ ID NO: 1982 - DNA, 21 bp, Artificial Sequence
  Synthetic sequence
gctaggtgatgcactgcttta

SEQ ID NO: 1983 - DNA, 21 bp, Artificial Sequence
  Synthetic sequence
gctaggtgatgcactgcttta

SEQ ID NO: 1984 - DNA, 21 bp, Artificial Sequence
  Synthetic sequence
gctaggtgatgcactgcttta

SEQ ID NO: 1985 - DNA, 21 bp, Artificial Sequence
  Synthetic sequence
gctaggtgatgcactgcttta

SEQ ID NO: 1986 - DNA, 21 bp, Artificial Sequence
  Synthetic sequence
gctaggtgatgcactgcttta

SEQ ID NO: 1987 - DNA, 21 bp, Artificial Sequence
  Synthetic sequence
gctaggtgatgcactgcttta

SEQ ID NO: 1988 - DNA, 21 bp, Artificial Sequence
  Synthetic sequence
gctaggtgatgcactgcttta

SEQ ID NO: 1989 - DNA, 21 bp, Artificial Sequence
  Synthetic sequence
gctaggtgatgcactgcttta

SEQ ID NO: 1990 - DNA, 21 bp, Artificial Sequence
  Synthetic sequence
gctaggtgatgcactgcttta

SEQ ID NO: 1991 - DNA, 21 bp, Artificial Sequence
  Synthetic sequence
gctaggtgatgcactgcttta

SEQ ID NO: 1992 - DNA, 21 bp, Artificial Sequence
  Synthetic sequence
gctaggtgatgcactgcttta

SEQ ID NO: 1993 - DNA, 21 bp, Artificial Sequence
  Synthetic sequence
gctaggtgatgcactgcttta

SEQ ID NO: 1994 - DNA, 21 bp, Artificial Sequence
  Synthetic sequence
gctaggtgatgcactgcttta

SEQ ID NO: 1995 - DNA, 21 bp, Artificial Sequence
  Synthetic sequence
gctaggtgatgcactgcttta

SEQ ID NO: 1996 - DNA, 21 bp, Artificial Sequence
  Synthetic sequence
gctaggtgatgcactgcttta

SEQ ID NO: 1997 - DNA, 22 bp, Artificial Sequence
  Synthetic sequence
gctaggtgatgcactgctttac

SEQ ID NO: 1998 - DNA, 22 bp, Artificial Sequence
  Synthetic sequence
gctaggtgatgcactgctttac

SEQ ID NO: 1999 - DNA, 22 bp, Artificial Sequence
  Synthetic sequence
gctaggtgatgcactgctttac

SEQ ID NO: 2000 - DNA, 22 bp, Artificial Sequence
  Synthetic sequence
gctaggtgatgcactgctttac

SEQ ID NO: 2001 - DNA, 22 bp, Artificial Sequence
  Synthetic sequence
gctaggtgatgcactgctttac

SEQ ID NO: 2002 - DNA, 22 bp, Artificial Sequence
  Synthetic sequence
gctaggtgatgcactgctttac

SEQ ID NO: 2003 - DNA, 22 bp, Artificial Sequence
  Synthetic sequence
gctaggtgatgcactgctttac

SEQ ID NO: 2004 - DNA, 22 bp, Artificial Sequence
  Synthetic sequence
gctaggtgatgcactgctttac

SEQ ID NO: 2005 - DNA, 22 bp, Artificial Sequence
  Synthetic sequence
gctaggtgatgcactgctttac

SEQ ID NO: 2006 - DNA, 22 bp, Artificial Sequence
  Synthetic sequence
gctaggtgatgcactgctttac

SEQ ID NO: 2007 - DNA, 22 bp, Artificial Sequence
  Synthetic sequence
gctaggtgatgcactgctttac

SEQ ID NO: 2008 - DNA, 22 bp, Artificial Sequence
  Synthetic sequence
gctaggtgatgcactgctttac

SEQ ID NO: 2009 - DNA, 22 bp, Artificial Sequence
  Synthetic sequence
gctaggtgatgcactgctttac

SEQ ID NO: 2010 - DNA, 22 bp, Artificial Sequence
  Synthetic sequence
gctaggtgatgcactgctttac

SEQ ID NO: 2011 - DNA, 22 bp, Artificial Sequence
  Synthetic sequence
gctaggtgatgcactgctttac

SEQ ID NO: 2012 - DNA, 22 bp, Artificial Sequence
  Synthetic sequence
gctaggtgatgcactgctttac

SEQ ID NO: 2013 - DNA, 23 bp, Artificial Sequence
  Synthetic sequence
gctaggtgatgcactgctttaca

SEQ ID NO: 2014 - DNA, 23 bp, Artificial Sequence
  Synthetic sequence
gctaggtgatgcactgctttaca

SEQ ID NO: 2015 - DNA, 23 bp, Artificial Sequence
  Synthetic sequence
gctaggtgatgcactgctttaca

SEQ ID NO: 2016 - DNA, 23 bp, Artificial Sequence
  Synthetic sequence
gctaggtgatgcactgctttaca

SEQ ID NO: 2017 - DNA, 23 bp, Artificial Sequence
  Synthetic sequence
gctaggtgatgcactgctttaca

SEQ ID NO: 2018 - DNA, 23 bp, Artificial Sequence
  Synthetic sequence
gctaggtgatgcactgctttaca

SEQ ID NO: 2019 - DNA, 23 bp, Artificial Sequence
  Synthetic sequence
gctaggtgatgcactgctttaca

SEQ ID NO: 2020 - DNA, 23 bp, Artificial Sequence
  Synthetic sequence
gctaggtgatgcactgctttaca

SEQ ID NO: 2021 - DNA, 23 bp, Artificial Sequence
  Synthetic sequence
gctaggtgatgcactgctttaca

SEQ ID NO: 2022 - DNA, 23 bp, Artificial Sequence
  Synthetic sequence
gctaggtgatgcactgctttaca

SEQ ID NO: 2023 - DNA, 23 bp, Artificial Sequence
  Synthetic sequence
gctaggtgatgcactgctttaca

SEQ ID NO: 2024 - DNA, 23 bp, Artificial Sequence
  Synthetic sequence
gctaggtgatgcactgctttaca

SEQ ID NO: 2025 - DNA, 23 bp, Artificial Sequence
  Synthetic sequence
gctaggtgatgcactgctttaca

SEQ ID NO: 2026 - DNA, 23 bp, Artificial Sequence
  Synthetic sequence
gctaggtgatgcactgctttaca

SEQ ID NO: 2027 - DNA, 23 bp, Artificial Sequence
  Synthetic sequence
gctaggtgatgcactgctttaca

SEQ ID NO: 2028 - DNA, 23 bp, Artificial Sequence
  Synthetic sequence
gctaggtgatgcactgctttaca

SEQ ID NO: 2029 - DNA, 21 bp, Artificial Sequence
  Synthetic sequence
gctaggtgatgcactgcttta

SEQ ID NO: 2030 - DNA, 21 bp, Artificial Sequence
  Synthetic sequence
gctaggtgatgcactgcttta

SEQ ID NO: 2031 - DNA, 21 bp, Artificial Sequence
  Synthetic sequence
gctaggtgatgcactgcttta

SEQ ID NO: 2032 - DNA, 21 bp, Artificial Sequence
  Synthetic sequence
gctaggtgatgcactgcttta

SEQ ID NO: 2033 - DNA, 21 bp, Artificial Sequence
  Synthetic sequence
gctaggtgatgcactgcttta

SEQ ID NO: 2034 - DNA, 21 bp, Artificial Sequence
  Synthetic sequence
gctaggtgatgcactgcttta

SEQ ID NO: 2035 - DNA, 21 bp, Artificial Sequence
  Synthetic sequence
gctaggtgatgcactgcttta

SEQ ID NO: 2036 - DNA, 21 bp, Artificial Sequence
  Synthetic sequence
gctaggtgatgcactgcttta

SEQ ID NO: 2037 - DNA, 21 bp, Artificial Sequence
  Synthetic sequence
gctaggtgatgcactgcttta

SEQ ID NO: 2038 - DNA, 21 bp, Artificial Sequence
  Synthetic sequence
gctaggtgatgcactgcttta

SEQ ID NO: 2039 - DNA, 21 bp, Artificial Sequence
  Synthetic sequence
gctaggtgatgcactgcttta

SEQ ID NO: 2040 - DNA, 21 bp, Artificial Sequence
  Synthetic sequence
gctaggtgatgcactgcttta

SEQ ID NO: 2041 - DNA, 21 bp, Artificial Sequence
  Synthetic sequence
gctaggtgatgcactgcttta

SEQ ID NO: 2042 - DNA, 21 bp, Artificial Sequence
  Synthetic sequence
gctaggtgatgcactgcttta

SEQ ID NO: 2043 - DNA, 21 bp, Artificial Sequence
  Synthetic sequence
gctaggtgatgcactgcttta

SEQ ID NO: 2044 - DNA, 21 bp, Artificial Sequence
  Synthetic sequence
gctaggtgatgcactgcttta

SEQ ID NO: 2045 - DNA, 22 bp, Artificial Sequence
  Synthetic sequence
gctaggtgatgcactgctttac

SEQ ID NO: 2046 - DNA, 22 bp, Artificial Sequence
  Synthetic sequence
gctaggtgatgcactgctttac

SEQ ID NO: 2047 - DNA, 22 bp, Artificial Sequence
  Synthetic sequence
gctaggtgatgcactgctttac

SEQ ID NO: 2048 - DNA, 22 bp, Artificial Sequence
  Synthetic sequence
gctaggtgatgcactgctttac

SEQ ID NO: 2049 - DNA, 22 bp, Artificial Sequence
  Synthetic sequence
gctaggtgatgcactgctttac

SEQ ID NO: 2050 - DNA, 22 bp, Artificial Sequence
  Synthetic sequence
gctaggtgatgcactgctttac

SEQ ID NO: 2051 - DNA, 22 bp, Artificial Sequence
  Synthetic sequence
gctaggtgatgcactgctttac

SEQ ID NO: 2052 - DNA, 22 bp, Artificial Sequence
  Synthetic sequence
gctaggtgatgcactgctttac

SEQ ID NO: 2053 - DNA, 22 bp, Artificial Sequence
  Synthetic sequence
gctaggtgatgcactgctttac

SEQ ID NO: 2054 - DNA, 22 bp, Artificial Sequence
  Synthetic sequence
gctaggtgatgcactgctttac

SEQ ID NO: 2055 - DNA, 22 bp, Artificial Sequence
  Synthetic sequence
gctaggtgatgcactgctttac

SEQ ID NO: 2056 - DNA, 22 bp, Artificial Sequence
  Synthetic sequence
gctaggtgatgcactgctttac

SEQ ID NO: 2057 - DNA, 22 bp, Artificial Sequence
  Synthetic sequence
gctaggtgatgcactgctttac

SEQ ID NO: 2058 - DNA, 22 bp, Artificial Sequence
  Synthetic sequence
gctaggtgatgcactgctttac

SEQ ID NO: 2059 - DNA, 22 bp, Artificial Sequence
  Synthetic sequence
gctaggtgatgcactgctttac

SEQ ID NO: 2060 - DNA, 22 bp, Artificial Sequence
  Synthetic sequence
gctaggtgatgcactgctttac

SEQ ID NO: 2061 - DNA, 20 bp, Artificial Sequence
  Synthetic sequence
caacagttgctaggtgatgc

SEQ ID NO: 2062 - DNA, 20 bp, Artificial Sequence
  Synthetic sequence
caacagttgctaggtgatgc

SEQ ID NO: 2063 - DNA, 20 bp, Artificial Sequence
  Synthetic sequence
caacagttgctaggtgatgc

SEQ ID NO: 2064 - DNA, 20 bp, Artificial Sequence
  Synthetic sequence
caacagttgctaggtgatgc

SEQ ID NO: 2065 - DNA, 20 bp, Artificial Sequence
  Synthetic sequence
caacagttgctaggtgatgc

SEQ ID NO: 2066 - DNA, 20 bp, Artificial Sequence
  Synthetic sequence
caacagttgctaggtgatgc

SEQ ID NO: 2067 - DNA, 20 bp, Artificial Sequence
  Synthetic sequence
caacagttgctaggtgatgc

SEQ ID NO: 2068 - DNA, 20 bp, Artificial Sequence
  Synthetic sequence
caacagttgctaggtgatgc

SEQ ID NO: 2069 - DNA, 20 bp, Artificial Sequence
  Synthetic sequence
caacagttgctaggtgatgc

SEQ ID NO: 2070 - DNA, 20 bp, Artificial Sequence
  Synthetic sequence
caacagttgctaggtgatgc

SEQ ID NO: 2071 - DNA, 20 bp, Artificial Sequence
  Synthetic sequence
caacagttgctaggtgatgc

SEQ ID NO: 2072 - DNA, 20 bp, Artificial Sequence
  Synthetic sequence
caacagttgctaggtgatgc

SEQ ID NO: 2073 - DNA, 20 bp, Artificial Sequence
  Synthetic sequence
caacagttgctaggtgatgc

SEQ ID NO: 2074 - DNA, 20 bp, Artificial Sequence
  Synthetic sequence
caacagttgctaggtgatgc

SEQ ID NO: 2075 - DNA, 20 bp, Artificial Sequence
  Synthetic sequence
caacagttgctaggtgatgc

SEQ ID NO: 2076 - DNA, 20 bp, Artificial Sequence
  Synthetic sequence
caacagttgctaggtgatgc

SEQ ID NO: 2077 - DNA, 20 bp, Artificial Sequence
  Synthetic sequence
caacagttgctaggtgatgc

SEQ ID NO: 2078 - DNA, 20 bp, Artificial Sequence
  Synthetic sequence
caacagttgctaggtgatgc

SEQ ID NO: 2079 - DNA, 20 bp, Artificial Sequence
  Synthetic sequence
caacagttgctaggtgatgc

SEQ ID NO: 2080 - DNA, 20 bp, Artificial Sequence
  Synthetic sequence
caacagttgctaggtgatgc

SEQ ID NO: 2081 - DNA, 20 bp, Artificial Sequence
  Synthetic sequence
caacagttgctaggtgatgc

SEQ ID NO: 2082 - DNA, 20 bp, Artificial Sequence
  Synthetic sequence
caacagttgctaggtgatgc

SEQ ID NO: 2083 - DNA, 19 bp, Artificial Sequence
  Synthetic sequence
caacagttgctaggtgatg

SEQ ID NO: 2084 - DNA, 19 bp, Artificial Sequence
  Synthetic sequence
caacagttgctaggtgatg

SEQ ID NO: 2085 - DNA, 19 bp, Artificial Sequence
  Synthetic sequence
caacagttgctaggtgatg

SEQ ID NO: 2086 - DNA, 19 bp, Artificial Sequence
  Synthetic sequence
caacagttgctaggtgatg

SEQ ID NO: 2087 - DNA, 19 bp, Artificial Sequence
  Synthetic sequence
caacagttgctaggtgatg

SEQ ID NO: 2088 - DNA, 19 bp, Artificial Sequence
  Synthetic sequence
aacagttgctaggtgatgc

SEQ ID NO: 2089 - DNA, 19 bp, Artificial Sequence
  Synthetic sequence
aacagttgctaggtgatgc

SEQ ID NO: 2090 - DNA, 19 bp, Artificial Sequence
  Synthetic sequence
aacagttgctaggtgatgc

SEQ ID NO: 2091 - DNA, 19 bp, Artificial Sequence
  Synthetic sequence
aacagttgctaggtgatgc

SEQ ID NO: 2092 - DNA, 19 bp, Artificial Sequence
  Synthetic sequence
aacagttgctaggtgatgc

SEQ ID NO: 2093 - DNA, 20 bp, Artificial Sequence
  Synthetic sequence
caacagttgctaggtgatgc

SEQ ID NO: 2094 - DNA, 20 bp, Artificial Sequence
  Synthetic sequence
caacagttgctaggtgatgc

SEQ ID NO: 2095 - DNA, 20 bp, Artificial Sequence
  Synthetic sequence
caacagttgctaggtgatgc

SEQ ID NO: 2096 - DNA, 20 bp, Artificial Sequence
  Synthetic sequence
caacagttgctaggtgatgc

SEQ ID NO: 2097 - DNA, 20 bp, Artificial Sequence
  Synthetic sequence
caacagttgctaggtgatgc

SEQ ID NO: 2098 - DNA, 20 bp, Artificial Sequence
  Synthetic sequence
caacagttgctaggtgatgc

SEQ ID NO: 2099 - DNA, 20 bp, Artificial Sequence
  Synthetic sequence
caacagttgctaggtgatgc

SEQ ID NO: 2100 - DNA, 20 bp, Artificial Sequence
  Synthetic sequence
caacagttgctaggtgatgc

SEQ ID NO: 2101 - DNA, 19 bp, Artificial Sequence
  Synthetic sequence
caacagttgctaggtgatg

SEQ ID NO: 2102 - DNA, 19 bp, Artificial Sequence
  Synthetic sequence
caacagttgctaggtgatg

SEQ ID NO: 2103 - DNA, 19 bp, Artificial Sequence
  Synthetic sequence
caacagttgctaggtgatg

SEQ ID NO: 2104 - DNA, 19 bp, Artificial Sequence
  Synthetic sequence
caacagttgctaggtgatg

SEQ ID NO: 2105 - DNA, 20 bp, Artificial Sequence
  Synthetic sequence
caacagttgctaggtgatgc

SEQ ID NO: 2106 - DNA, 20 bp, Artificial Sequence
  Synthetic sequence
caacagttgctaggtgatgc

SEQ ID NO: 2107 - DNA, 20 bp, Artificial Sequence
  Synthetic sequence
caacagttgctaggtgatgc

SEQ ID NO: 2108 - DNA, 18 bp, Artificial Sequence
  Synthetic sequence
caacagttgctaggtgat

SEQ ID NO: 2109 - DNA, 18 bp, Artificial Sequence
  Synthetic sequence
caacagttgctaggtgat

SEQ ID NO: 2110 - DNA, 18 bp, Artificial Sequence
  Synthetic sequence
caacagttgctaggtgat

SEQ ID NO: 2111 - DNA, 18 bp, Artificial Sequence
  Synthetic sequence
caacagttgctaggtgat

SEQ ID NO: 2112 - DNA, 18 bp, Artificial Sequence
  Synthetic sequence
acagttgctaggtgatgc

SEQ ID NO: 2113 - DNA, 18 bp, Artificial Sequence
  Synthetic sequence
acagttgctaggtgatgc

SEQ ID NO: 2114 - DNA, 18 bp, Artificial Sequence
  Synthetic sequence
acagttgctaggtgatgc

SEQ ID NO: 2115 - DNA, 18 bp, Artificial Sequence
  Synthetic sequence
acagttgctaggtgatgc

SEQ ID NO: 2116 - DNA, 20 bp, Artificial Sequence
  Synthetic sequence
caacagttgctaggtgatgc

SEQ ID NO: 2117 - DNA, 20 bp, Artificial Sequence
  Synthetic sequence
caacagttgctaggtgatgc

SEQ ID NO: 2118 - DNA, 20 bp, Artificial Sequence
  Synthetic sequence
caacagttgctaggtgatgc

SEQ ID NO: 2119 - DNA, 20 bp, Artificial Sequence
  Synthetic sequence
caacagttgctaggtgatgc

SEQ ID NO: 2120 - DNA, 20 bp, Artificial Sequence
  Synthetic sequence
caacagttgctaggtgatgc

SEQ ID NO: 2121 - DNA, 20 bp, Artificial Sequence
  Synthetic sequence
caacagttgctaggtgatgc

SEQ ID NO: 2122 - DNA, 19 bp, Artificial Sequence
  Synthetic sequence
caacagttgctaggtgatg

SEQ ID NO: 2123 - DNA, 19 bp, Artificial Sequence
  Synthetic sequence
caacagttgctaggtgatg

SEQ ID NO: 2124 - DNA, 19 bp, Artificial Sequence
  Synthetic sequence
caacagttgctaggtgatg

SEQ ID NO: 2125 - DNA, 19 bp, Artificial Sequence
  Synthetic sequence
aacagttgctaggtgatgc

SEQ ID NO: 2126 - DNA, 19 bp, Artificial Sequence
  Synthetic sequence
aacagttgctaggtgatgc

SEQ ID NO: 2127 - DNA, 19 bp, Artificial Sequence
  Synthetic sequence
aacagttgctaggtgatgc

SEQ ID NO: 2128 - DNA, 18 bp, Artificial Sequence
  Synthetic sequence
caacagttgctaggtgat

SEQ ID NO: 2129 - DNA, 18 bp, Artificial Sequence
  Synthetic sequence
caacagttgctaggtgat

SEQ ID NO: 2130 - DNA, 18 bp, Artificial Sequence
  Synthetic sequence
caacagttgctaggtgat

SEQ ID NO: 2131 - DNA, 18 bp, Artificial Sequence
  Synthetic sequence
acagttgctaggtgatgc

SEQ ID NO: 2132 - DNA, 18 bp, Artificial Sequence
  Synthetic sequence
acagttgctaggtgatgc

SEQ ID NO: 2133 - DNA, 18 bp, Artificial Sequence
  Synthetic sequence
acagttgctaggtgatgc

SEQ ID NO: 2134 - DNA, 17 bp, Artificial Sequence
  Synthetic sequence
caacagttgctaggtga

SEQ ID NO: 2135 - DNA, 17 bp, Artificial Sequence
  Synthetic sequence
caacagttgctaggtga

SEQ ID NO: 2136 - DNA, 17 bp, Artificial Sequence
  Synthetic sequence
caacagttgctaggtga

SEQ ID NO: 2137 - DNA, 17 bp, Artificial Sequence
  Synthetic sequence
cagttgctaggtgatgc

SEQ ID NO: 2138 - DNA, 17 bp, Artificial Sequence
  Synthetic sequence
cagttgctaggtgatgc

SEQ ID NO: 2139 - DNA, 17 bp, Artificial Sequence
  Synthetic sequence
cagttgctaggtgatgc

SEQ ID NO: 2140 - DNA, 19 bp, Artificial Sequence
  Synthetic sequence
aacagttgctaggtgatgc

SEQ ID NO: 2141 - DNA, 19 bp, Artificial Sequence
  Synthetic sequence
aacagttgctaggtgatgc

SEQ ID NO: 2142 - DNA, 19 bp, Artificial Sequence
  Synthetic sequence
caacagttgctaggtgatg

SEQ ID NO: 2143 - DNA, 19 bp, Artificial Sequence
  Synthetic sequence
caacagttgctaggtgatg

SEQ ID NO: 2144 - DNA, 18 bp, Artificial Sequence
  Synthetic sequence
aacagttgctaggtgatg

SEQ ID NO: 2145 - DNA, 18 bp, Artificial Sequence
  Synthetic sequence
aacagttgctaggtgatg

SEQ ID NO: 2146 - DNA, 18 bp, Artificial Sequence
  Synthetic sequence
aacagttgctaggtgatg

SEQ ID NO: 2147 - DNA, 18 bp, Artificial Sequence
  Synthetic sequence
aacagttgctaggtgatg

SEQ ID NO: 2148 - DNA, 17 bp, Artificial Sequence
  Synthetic sequence
aacagttgctaggtgat

SEQ ID NO: 2149 - DNA, 17 bp, Artificial Sequence
  Synthetic sequence
aacagttgctaggtgat

SEQ ID NO: 2150 - DNA, 17 bp, Artificial Sequence
  Synthetic sequence
aacagttgctaggtgat

SEQ ID NO: 2151 - DNA, 20 bp, Artificial Sequence
  Synthetic sequence
caacagttgctaggtgatgc

SEQ ID NO: 2152 - DNA, 20 bp, Artificial Sequence
  Synthetic sequence
caacagttgctaggtgatgc

SEQ ID NO: 2153 - DNA, 20 bp, Artificial Sequence
  Synthetic sequence
caacagttgctaggtgatgc

SEQ ID NO: 2154 - DNA, 20 bp, Artificial Sequence
  Synthetic sequence
caacagttgctaggtgatgc

SEQ ID NO: 2155 - DNA, 19 bp, Artificial Sequence
  Synthetic sequence
caacagttgctaggtgatg

SEQ ID NO: 2156 - DNA, 19 bp, Artificial Sequence
  Synthetic sequence
aacagttgctaggtgatgc

SEQ ID NO: 2157 - DNA, 20 bp, Artificial Sequence
  Synthetic sequence
caacagttgctaggtgatgc

SEQ ID NO: 2158 - DNA, 20 bp, Artificial Sequence
  Synthetic sequence
caacagttgctaggtgatgc

SEQ ID NO: 2159 - DNA, 19 bp, Artificial Sequence
  Synthetic sequence
caacagttgctaggtgatg

SEQ ID NO: 2160 - DNA, 20 bp, Artificial Sequence
  Synthetic sequence
caacagttgctaggtgatgc

SEQ ID NO: 2161 - DNA, 18 bp, Artificial Sequence
  Synthetic sequence
caacagttgctaggtgat

SEQ ID NO: 2162 - DNA, 18 bp, Artificial Sequence
  Synthetic sequence
acagttgctaggtgatgc

SEQ ID NO: 2163 - DNA, 20 bp, Artificial Sequence
  Synthetic sequence
caacagttgctaggtgatgc

SEQ ID NO: 2164 - DNA, 19 bp, Artificial Sequence
  Synthetic sequence
caacagttgctaggtgatg

SEQ ID NO: 2165 - DNA, 18 bp, Artificial Sequence
  Synthetic sequence
caacagttgctaggtgat

SEQ ID NO: 2166 - DNA, 18 bp, Artificial Sequence
  Synthetic sequence
acagttgctaggtgatgc

SEQ ID NO: 2167 - DNA, 17 bp, Artificial Sequence
  Synthetic sequence
caacagttgctaggtga

SEQ ID NO: 2168 - DNA, 17 bp, Artificial Sequence
  Synthetic sequence
cagttgctaggtgatgc

SEQ ID NO: 2169 - DNA, 19 bp, Artificial Sequence
  Synthetic sequence
aacagttgctaggtgatgc

SEQ ID NO: 2170 - DNA, 18 bp, Artificial Sequence
  Synthetic sequence
aacagttgctaggtgatg

SEQ ID NO: 2171 - DNA, 17 bp, Artificial Sequence
  Synthetic sequence
aacagttgctaggtgat

SEQ ID NO: 2172 - DNA, 20 bp, Artificial Sequence
  Synthetic sequence
caacagttgctaggtgatgc

SEQ ID NO: 2173 - DNA, 20 bp, Artificial Sequence
  Synthetic sequence
caacagttgctaggtgatgc

SEQ ID NO: 2174 - DNA, 20 bp, Artificial Sequence
  Synthetic sequence
caacagttgctaggtgatgc

SEQ ID NO: 2175 - DNA, 20 bp, Artificial Sequence
  Synthetic sequence
caacagttgctaggtgatgc

SEQ ID NO: 2176 - DNA, 20 bp, Artificial Sequence
  Synthetic sequence
caacagttgctaggtgatgc

SEQ ID NO: 2177 - DNA, 20 bp, Artificial Sequence
  Synthetic sequence
caacagttgctaggtgatgc

SEQ ID NO: 2178 - DNA, 20 bp, Artificial Sequence
  Synthetic sequence
caacagttgctaggtgatgc

SEQ ID NO: 2179 - DNA, 20 bp, Artificial Sequence
  Synthetic sequence
caacagttgctaggtgatgc

SEQ ID NO: 2180 - DNA, 20 bp, Artificial Sequence
  Synthetic sequence
caacagttgctaggtgatgc

SEQ ID NO: 2181 - DNA, 20 bp, Artificial Sequence
  Synthetic sequence
caacagttgctaggtgatgc

SEQ ID NO: 2182 - DNA, 20 bp, Artificial Sequence
  Synthetic sequence
caacagttgctaggtgatgc

SEQ ID NO: 2183 - DNA, 20 bp, Artificial Sequence
  Synthetic sequence
caacagttgctaggtgatgc

SEQ ID NO: 2184 - DNA, 20 bp, Artificial Sequence
  Synthetic sequence
caacagttgctaggtgatgc

SEQ ID NO: 2185 - DNA, 20 bp, Artificial Sequence
  Synthetic sequence
caacagttgctaggtgatgc

SEQ ID NO: 2186 - DNA, 20 bp, Artificial Sequence
  Synthetic sequence
caacagttgctaggtgatgc

SEQ ID NO: 2187 - DNA, 21 bp, Artificial Sequence
  Synthetic sequence
caacagttgctaggtgatgca

SEQ ID NO: 2188 - DNA, 21 bp, Artificial Sequence
  Synthetic sequence
caacagttgctaggtgatgca

SEQ ID NO: 2189 - DNA, 21 bp, Artificial Sequence
  Synthetic sequence
caacagttgctaggtgatgca

SEQ ID NO: 2190 - DNA, 21 bp, Artificial Sequence
  Synthetic sequence
caacagttgctaggtgatgca

SEQ ID NO: 2191 - DNA, 21 bp, Artificial Sequence
  Synthetic sequence
caacagttgctaggtgatgca

SEQ ID NO: 2192 - DNA, 21 bp, Artificial Sequence
  Synthetic sequence
caacagttgctaggtgatgca

SEQ ID NO: 2193 - DNA, 21 bp, Artificial Sequence
  Synthetic sequence
caacagttgctaggtgatgca

SEQ ID NO: 2194 - DNA, 21 bp, Artificial Sequence
  Synthetic sequence
caacagttgctaggtgatgca

SEQ ID NO: 2195 - DNA, 21 bp, Artificial Sequence
  Synthetic sequence
caacagttgctaggtgatgca

SEQ ID NO: 2196 - DNA, 21 bp, Artificial Sequence
  Synthetic sequence
caacagttgctaggtgatgca

SEQ ID NO: 2197 - DNA, 21 bp, Artificial Sequence
  Synthetic sequence
caacagttgctaggtgatgca

SEQ ID NO: 2198 - DNA, 21 bp, Artificial Sequence
  Synthetic sequence
caacagttgctaggtgatgca

SEQ ID NO: 2199 - DNA, 21 bp, Artificial Sequence
  Synthetic sequence
caacagttgctaggtgatgca

SEQ ID NO: 2200 - DNA, 21 bp, Artificial Sequence
  Synthetic sequence
caacagttgctaggtgatgca

SEQ ID NO: 2201 - DNA, 21 bp, Artificial Sequence
  Synthetic sequence
caacagttgctaggtgatgca

SEQ ID NO: 2202 - DNA, 21 bp, Artificial Sequence
  Synthetic sequence
caacagttgctaggtgatgca

SEQ ID NO: 2203 - DNA, 22 bp, Artificial Sequence
  Synthetic sequence
caacagttgctaggtgatgcac

SEQ ID NO: 2204 - DNA, 22 bp, Artificial Sequence
  Synthetic sequence
caacagttgctaggtgatgcac

SEQ ID NO: 2205 - DNA, 22 bp, Artificial Sequence
  Synthetic sequence
caacagttgctaggtgatgcac

SEQ ID NO: 2206 - DNA, 22 bp, Artificial Sequence
  Synthetic sequence
caacagttgctaggtgatgcac

SEQ ID NO: 2207 - DNA, 22 bp, Artificial Sequence
  Synthetic sequence
caacagttgctaggtgatgcac

SEQ ID NO: 2208 - DNA, 22 bp, Artificial Sequence
  Synthetic sequence
caacagttgctaggtgatgcac

SEQ ID NO: 2209 - DNA, 22 bp, Artificial Sequence
  Synthetic sequence
caacagttgctaggtgatgcac

SEQ ID NO: 2210 - DNA, 22 bp, Artificial Sequence
  Synthetic sequence
caacagttgctaggtgatgcac

SEQ ID NO: 2211 - DNA, 22 bp, Artificial Sequence
  Synthetic sequence
caacagttgctaggtgatgcac

SEQ ID NO: 2212 - DNA, 22 bp, Artificial Sequence
  Synthetic sequence
caacagttgctaggtgatgcac

SEQ ID NO: 2213 - DNA, 22 bp, Artificial Sequence
  Synthetic sequence
caacagttgctaggtgatgcac

SEQ ID NO: 2214 - DNA, 22 bp, Artificial Sequence
  Synthetic sequence
caacagttgctaggtgatgcac

SEQ ID NO: 2215 - DNA, 22 bp, Artificial Sequence
  Synthetic sequence
caacagttgctaggtgatgcac

SEQ ID NO: 2216 - DNA, 22 bp, Artificial Sequence
  Synthetic sequence
caacagttgctaggtgatgcac

SEQ ID NO: 2217 - DNA, 22 bp, Artificial Sequence
  Synthetic sequence
caacagttgctaggtgatgcac

SEQ ID NO: 2218 - DNA, 22 bp, Artificial Sequence
  Synthetic sequence
caacagttgctaggtgatgcac

SEQ ID NO: 2219 - DNA, 23 bp, Artificial Sequence
  Synthetic sequence
caacagttgctaggtgatgcact

SEQ ID NO: 2220 - DNA, 23 bp, Artificial Sequence
  Synthetic sequence
caacagttgctaggtgatgcact

SEQ ID NO: 2221 - DNA, 23 bp, Artificial Sequence
  Synthetic sequence
caacagttgctaggtgatgcact

SEQ ID NO: 2222 - DNA, 23 bp, Artificial Sequence
  Synthetic sequence
caacagttgctaggtgatgcact

SEQ ID NO: 2223 - DNA, 23 bp, Artificial Sequence
  Synthetic sequence
caacagttgctaggtgatgcact

SEQ ID NO: 2224 - DNA, 23 bp, Artificial Sequence
  Synthetic sequence
caacagttgctaggtgatgcact

SEQ ID NO: 2225 - DNA, 23 bp, Artificial Sequence
  Synthetic sequence
caacagttgctaggtgatgcact

SEQ ID NO: 2226 - DNA, 23 bp, Artificial Sequence
  Synthetic sequence
caacagttgctaggtgatgcact

SEQ ID NO: 2227 - DNA, 23 bp, Artificial Sequence
  Synthetic sequence
caacagttgctaggtgatgcact

SEQ ID NO: 2228 - DNA, 23 bp, Artificial Sequence
  Synthetic sequence
caacagttgctaggtgatgcact

SEQ ID NO: 2229 - DNA, 23 bp, Artificial Sequence
  Synthetic sequence
caacagttgctaggtgatgcact

SEQ ID NO: 2230 - DNA, 23 bp, Artificial Sequence
  Synthetic sequence
caacagttgctaggtgatgcact

SEQ ID NO: 2231 - DNA, 23 bp, Artificial Sequence
  Synthetic sequence
caacagttgctaggtgatgcact

SEQ ID NO: 2232 - DNA, 23 bp, Artificial Sequence
  Synthetic sequence
caacagttgctaggtgatgcact

SEQ ID NO: 2233 - DNA, 23 bp, Artificial Sequence
  Synthetic sequence
caacagttgctaggtgatgcact

SEQ ID NO: 2234 - DNA, 23 bp, Artificial Sequence
  Synthetic sequence
caacagttgctaggtgatgcact

SEQ ID NO: 2235 - DNA, 21 bp, Artificial Sequence
  Synthetic sequence
caacagttgctaggtgatgca

SEQ ID NO: 2236 - DNA, 21 bp, Artificial Sequence
  Synthetic sequence
caacagttgctaggtgatgca

SEQ ID NO: 2237 - DNA, 21 bp, Artificial Sequence
  Synthetic sequence
caacagttgctaggtgatgca

SEQ ID NO: 2238 - DNA, 21 bp, Artificial Sequence
  Synthetic sequence
caacagttgctaggtgatgca

SEQ ID NO: 2239 - DNA, 21 bp, Artificial Sequence
  Synthetic sequence
caacagttgctaggtgatgca

SEQ ID NO: 2240 - DNA, 21 bp, Artificial Sequence
  Synthetic sequence
caacagttgctaggtgatgca

SEQ ID NO: 2241 - DNA, 21 bp, Artificial Sequence
  Synthetic sequence
caacagttgctaggtgatgca

SEQ ID NO: 2242 - DNA, 21 bp, Artificial Sequence
  Synthetic sequence
caacagttgctaggtgatgca

SEQ ID NO: 2243 - DNA, 21 bp, Artificial Sequence
  Synthetic sequence
caacagttgctaggtgatgca

SEQ ID NO: 2244 - DNA, 21 bp, Artificial Sequence
  Synthetic sequence
caacagttgctaggtgatgca

SEQ ID NO: 2245 - DNA, 21 bp, Artificial Sequence
  Synthetic sequence
caacagttgctaggtgatgca

SEQ ID NO: 2246 - DNA, 21 bp, Artificial Sequence
  Synthetic sequence
caacagttgctaggtgatgca

SEQ ID NO: 2247 - DNA, 21 bp, Artificial Sequence
  Synthetic sequence
caacagttgctaggtgatgca

SEQ ID NO: 2248 - DNA, 21 bp, Artificial Sequence
  Synthetic sequence
caacagttgctaggtgatgca

SEQ ID NO: 2249 - DNA, 21 bp, Artificial Sequence
  Synthetic sequence
caacagttgctaggtgatgca

SEQ ID NO: 2250 - DNA, 21 bp, Artificial Sequence
  Synthetic sequence
caacagttgctaggtgatgca

SEQ ID NO: 2251 - DNA, 22 bp, Artificial Sequence
  Synthetic sequence
caacagttgctaggtgatgcac

SEQ ID NO: 2252 - DNA, 22 bp, Artificial Sequence
  Synthetic sequence
caacagttgctaggtgatgcac

SEQ ID NO: 2253 - DNA, 22 bp, Artificial Sequence
  Synthetic sequence
caacagttgctaggtgatgcac

SEQ ID NO: 2254 - DNA, 22 bp, Artificial Sequence
  Synthetic sequence
caacagttgctaggtgatgcac

SEQ ID NO: 2255 - DNA, 22 bp, Artificial Sequence
  Synthetic sequence
caacagttgctaggtgatgcac

SEQ ID NO: 2256 - DNA, 22 bp, Artificial Sequence
  Synthetic sequence
caacagttgctaggtgatgcac

SEQ ID NO: 2257 - DNA, 22 bp, Artificial Sequence
  Synthetic sequence
caacagttgctaggtgatgcac

SEQ ID NO: 2258 - DNA, 22 bp, Artificial Sequence
  Synthetic sequence
caacagttgctaggtgatgcac

SEQ ID NO: 2259 - DNA, 22 bp, Artificial Sequence
  Synthetic sequence
caacagttgctaggtgatgcac

SEQ ID NO: 2260 - DNA, 22 bp, Artificial Sequence
  Synthetic sequence
caacagttgctaggtgatgcac

SEQ ID NO: 2261 - DNA, 22 bp, Artificial Sequence
  Synthetic sequence
caacagttgctaggtgatgcac

SEQ ID NO: 2262 - DNA, 22 bp, Artificial Sequence
  Synthetic sequence
caacagttgctaggtgatgcac

SEQ ID NO: 2263 - DNA, 22 bp, Artificial Sequence
  Synthetic sequence
caacagttgctaggtgatgcac

SEQ ID NO: 2264 - DNA, 22 bp, Artificial Sequence
  Synthetic sequence
caacagttgctaggtgatgcac

SEQ ID NO: 2265 - DNA, 22 bp, Artificial Sequence
  Synthetic sequence
caacagttgctaggtgatgcac

SEQ ID NO: 2266 - DNA, 22 bp, Artificial Sequence
  Synthetic sequence
caacagttgctaggtgatgcac

SEQ ID NO: 2267 - DNA, 20 bp, Artificial Sequence
  Synthetic sequence
gtcaacagttgctaggtgat

SEQ ID NO: 2268 - DNA, 20 bp, Artificial Sequence
  Synthetic sequence
gtcaacagttgctaggtgat

SEQ ID NO: 2269 - DNA, 20 bp, Artificial Sequence
  Synthetic sequence
gtcaacagttgctaggtgat

SEQ ID NO: 2270 - DNA, 20 bp, Artificial Sequence
  Synthetic sequence
gtcaacagttgctaggtgat

SEQ ID NO: 2271 - DNA, 20 bp, Artificial Sequence
  Synthetic sequence
gtcaacagttgctaggtgat

SEQ ID NO: 2272 - DNA, 20 bp, Artificial Sequence
  Synthetic sequence
gtcaacagttgctaggtgat

SEQ ID NO: 2273 - DNA, 20 bp, Artificial Sequence
  Synthetic sequence
gtcaacagttgctaggtgat

SEQ ID NO: 2274 - DNA, 20 bp, Artificial Sequence
  Synthetic sequence
gtcaacagttgctaggtgat

SEQ ID NO: 2275 - DNA, 20 bp, Artificial Sequence
  Synthetic sequence
gtcaacagttgctaggtgat

SEQ ID NO: 2276 - DNA, 20 bp, Artificial Sequence
  Synthetic sequence
gtcaacagttgctaggtgat

SEQ ID NO: 2277 - DNA, 20 bp, Artificial Sequence
  Synthetic sequence
gtcaacagttgctaggtgat

SEQ ID NO: 2278 - DNA, 20 bp, Artificial Sequence
  Synthetic sequence
gtcaacagttgctaggtgat

SEQ ID NO: 2279 - DNA, 20 bp, Artificial Sequence
  Synthetic sequence
gtcaacagttgctaggtgat

SEQ ID NO: 2280 - DNA, 20 bp, Artificial Sequence
  Synthetic sequence
gtcaacagttgctaggtgat

SEQ ID NO: 2281 - DNA, 20 bp, Artificial Sequence
  Synthetic sequence
gtcaacagttgctaggtgat

SEQ ID NO: 2282 - DNA, 20 bp, Artificial Sequence
  Synthetic sequence
gtcaacagttgctaggtgat

SEQ ID NO: 2283 - DNA, 20 bp, Artificial Sequence
  Synthetic sequence
gtcaacagttgctaggtgat

SEQ ID NO: 2284 - DNA, 20 bp, Artificial Sequence
  Synthetic sequence
gtcaacagttgctaggtgat

SEQ ID NO: 2285 - DNA, 20 bp, Artificial Sequence
  Synthetic sequence
gtcaacagttgctaggtgat

SEQ ID NO: 2286 - DNA, 20 bp, Artificial Sequence
  Synthetic sequence
gtcaacagttgctaggtgat

SEQ ID NO: 2287 - DNA, 20 bp, Artificial Sequence
  Synthetic sequence
gtcaacagttgctaggtgat

SEQ ID NO: 2288 - DNA, 20 bp, Artificial Sequence
  Synthetic sequence
gtcaacagttgctaggtgat

SEQ ID NO: 2289 - DNA, 19 bp, Artificial Sequence
  Synthetic sequence
gtcaacagttgctaggtga

SEQ ID NO: 2290 - DNA, 19 bp, Artificial Sequence
  Synthetic sequence
gtcaacagttgctaggtga

SEQ ID NO: 2291 - DNA, 19 bp, Artificial Sequence
  Synthetic sequence
gtcaacagttgctaggtga

SEQ ID NO: 2292 - DNA, 19 bp, Artificial Sequence
  Synthetic sequence
gtcaacagttgctaggtga

SEQ ID NO: 2293 - DNA, 19 bp, Artificial Sequence
  Synthetic sequence
gtcaacagttgctaggtga

SEQ ID NO: 2294 - DNA, 19 bp, Artificial Sequence
  Synthetic sequence
tcaacagttgctaggtgat

SEQ ID NO: 2295 - DNA, 19 bp, Artificial Sequence
  Synthetic sequence
tcaacagttgctaggtgat

SEQ ID NO: 2296 - DNA, 19 bp, Artificial Sequence
  Synthetic sequence
tcaacagttgctaggtgat

SEQ ID NO: 2297 - DNA, 19 bp, Artificial Sequence
  Synthetic sequence
tcaacagttgctaggtgat

SEQ ID NO: 2298 - DNA, 19 bp, Artificial Sequence
  Synthetic sequence
tcaacagttgctaggtgat

SEQ ID NO: 2299 - DNA, 20 bp, Artificial Sequence
  Synthetic sequence
gtcaacagttgctaggtgat

SEQ ID NO: 2300 - DNA, 20 bp, Artificial Sequence
  Synthetic sequence
gtcaacagttgctaggtgat

SEQ ID NO: 2301 - DNA, 20 bp, Artificial Sequence
  Synthetic sequence
gtcaacagttgctaggtgat

SEQ ID NO: 2302 - DNA, 20 bp, Artificial Sequence
  Synthetic sequence
gtcaacagttgctaggtgat

SEQ ID NO: 2303 - DNA, 20 bp, Artificial Sequence
  Synthetic sequence
gtcaacagttgctaggtgat

SEQ ID NO: 2304 - DNA, 20 bp, Artificial Sequence
  Synthetic sequence
gtcaacagttgctaggtgat

SEQ ID NO: 2305 - DNA, 20 bp, Artificial Sequence
  Synthetic sequence
gtcaacagttgctaggtgat

SEQ ID NO: 2306 - DNA, 20 bp, Artificial Sequence
  Synthetic sequence
gtcaacagttgctaggtgat

SEQ ID NO: 2307 - DNA, 19 bp, Artificial Sequence
  Synthetic sequence
gtcaacagttgctaggtga

SEQ ID NO: 2308 - DNA, 19 bp, Artificial Sequence
  Synthetic sequence
gtcaacagttgctaggtga

SEQ ID NO: 2309 - DNA, 19 bp, Artificial Sequence
  Synthetic sequence
gtcaacagttgctaggtga

SEQ ID NO: 2310 - DNA, 19 bp, Artificial Sequence
  Synthetic sequence
gtcaacagttgctaggtga

SEQ ID NO: 2311 - DNA, 20 bp, Artificial Sequence
  Synthetic sequence
gtcaacagttgctaggtgat

SEQ ID NO: 2312 - DNA, 20 bp, Artificial Sequence
  Synthetic sequence
gtcaacagttgctaggtgat

SEQ ID NO: 2313 - DNA, 20 bp, Artificial Sequence
  Synthetic sequence
gtcaacagttgctaggtgat

SEQ ID NO: 2314 - DNA, 18 bp, Artificial Sequence
  Synthetic sequence
gtcaacagttgctaggtg

SEQ ID NO: 2315 - DNA, 18 bp, Artificial Sequence
  Synthetic sequence
gtcaacagttgctaggtg

SEQ ID NO: 2316 - DNA, 18 bp, Artificial Sequence
  Synthetic sequence
gtcaacagttgctaggtg

SEQ ID NO: 2317 - DNA, 18 bp, Artificial Sequence
  Synthetic sequence
gtcaacagttgctaggtg

SEQ ID NO: 2318 - DNA, 18 bp, Artificial Sequence
  Synthetic sequence
caacagttgctaggtgat

SEQ ID NO: 2319 - DNA, 18 bp, Artificial Sequence
  Synthetic sequence
caacagttgctaggtgat

SEQ ID NO: 2320 - DNA, 18 bp, Artificial Sequence
  Synthetic sequence
caacagttgctaggtgat

SEQ ID NO: 2321 - DNA, 18 bp, Artificial Sequence
  Synthetic sequence
caacagttgctaggtgat

SEQ ID NO: 2322 - DNA, 20 bp, Artificial Sequence
  Synthetic sequence
gtcaacagttgctaggtgat

SEQ ID NO: 2323 - DNA, 20 bp, Artificial Sequence
  Synthetic sequence
gtcaacagttgctaggtgat

SEQ ID NO: 2324 - DNA, 20 bp, Artificial Sequence
  Synthetic sequence
gtcaacagttgctaggtgat

SEQ ID NO: 2325 - DNA, 20 bp, Artificial Sequence
  Synthetic sequence
gtcaacagttgctaggtgat

SEQ ID NO: 2326 - DNA, 20 bp, Artificial Sequence
  Synthetic sequence
gtcaacagttgctaggtgat

SEQ ID NO: 2327 - DNA, 20 bp, Artificial Sequence
  Synthetic sequence
gtcaacagttgctaggtgat

SEQ ID NO: 2328 - DNA, 19 bp, Artificial Sequence
  Synthetic sequence
gtcaacagttgctaggtga

SEQ ID NO: 2329 - DNA, 19 bp, Artificial Sequence
  Synthetic sequence
gtcaacagttgctaggtga

SEQ ID NO: 2330 - DNA, 19 bp, Artificial Sequence
  Synthetic sequence
gtcaacagttgctaggtga

SEQ ID NO: 2331 - DNA, 19 bp, Artificial Sequence
  Synthetic sequence
tcaacagttgctaggtgat

SEQ ID NO: 2332 - DNA, 19 bp, Artificial Sequence
  Synthetic sequence
tcaacagttgctaggtgat

SEQ ID NO: 2333 - DNA, 19 bp, Artificial Sequence
  Synthetic sequence
tcaacagttgctaggtgat

SEQ ID NO: 2334 - DNA, 18 bp, Artificial Sequence
  Synthetic sequence
gtcaacagttgctaggtg

SEQ ID NO: 2335 - DNA, 18 bp, Artificial Sequence
  Synthetic sequence
gtcaacagttgctaggtg

SEQ ID NO: 2336 - DNA, 18 bp, Artificial Sequence
  Synthetic sequence
gtcaacagttgctaggtg

SEQ ID NO: 2337 - DNA, 18 bp, Artificial Sequence
  Synthetic sequence
caacagttgctaggtgat

SEQ ID NO: 2338 - DNA, 18 bp, Artificial Sequence
  Synthetic sequence
caacagttgctaggtgat

SEQ ID NO: 2339 - DNA, 18 bp, Artificial Sequence
  Synthetic sequence
caacagttgctaggtgat

SEQ ID NO: 2340 - DNA, 17 bp, Artificial Sequence
  Synthetic sequence
gtcaacagttgctaggt

SEQ ID NO: 2341 - DNA, 17 bp, Artificial Sequence
  Synthetic sequence
gtcaacagttgctaggt

SEQ ID NO: 2342 - DNA, 17 bp, Artificial Sequence
  Synthetic sequence
gtcaacagttgctaggt

SEQ ID NO: 2343 - DNA, 17 bp, Artificial Sequence
  Synthetic sequence
aacagttgctaggtgat

SEQ ID NO: 2344 - DNA, 17 bp, Artificial Sequence
  Synthetic sequence
aacagttgctaggtgat

SEQ ID NO: 2345 - DNA, 17 bp, Artificial Sequence
  Synthetic sequence
aacagttgctaggtgat

SEQ ID NO: 2346 - DNA, 19 bp, Artificial Sequence
  Synthetic sequence
tcaacagttgctaggtgat

SEQ ID NO: 2347 - DNA, 19 bp, Artificial Sequence
  Synthetic sequence
tcaacagttgctaggtgat

SEQ ID NO: 2348 - DNA, 19 bp, Artificial Sequence
  Synthetic sequence
gtcaacagttgctaggtga

SEQ ID NO: 2349 - DNA, 19 bp, Artificial Sequence
  Synthetic sequence
gtcaacagttgctaggtga

SEQ ID NO: 2350 - DNA, 18 bp, Artificial Sequence
  Synthetic sequence
tcaacagttgctaggtga

SEQ ID NO: 2351 - DNA, 18 bp, Artificial Sequence
  Synthetic sequence
tcaacagttgctaggtga

SEQ ID NO: 2352 - DNA, 18 bp, Artificial Sequence
  Synthetic sequence
tcaacagttgctaggtga

SEQ ID NO: 2353 - DNA, 18 bp, Artificial Sequence
  Synthetic sequence
tcaacagttgctaggtga

SEQ ID NO: 2354 - DNA, 17 bp, Artificial Sequence
  Synthetic sequence
tcaacagttgctaggtg

SEQ ID NO: 2355 - DNA, 17 bp, Artificial Sequence
  Synthetic sequence
tcaacagttgctaggtg

SEQ ID NO: 2356 - DNA, 17 bp, Artificial Sequence
  Synthetic sequence
tcaacagttgctaggtg

SEQ ID NO: 2357 - DNA, 20 bp, Artificial Sequence
  Synthetic sequence
gtcaacagttgctaggtgat

SEQ ID NO: 2358 - DNA, 20 bp, Artificial Sequence
  Synthetic sequence
gtcaacagttgctaggtgat

SEQ ID NO: 2359 - DNA, 20 bp, Artificial Sequence
  Synthetic sequence
gtcaacagttgctaggtgat

SEQ ID NO: 2360 - DNA, 20 bp, Artificial Sequence
  Synthetic sequence
gtcaacagttgctaggtgat

SEQ ID NO: 2361 - DNA, 19 bp, Artificial Sequence
  Synthetic sequence
gtcaacagttgctaggtga

SEQ ID NO: 2362 - DNA, 19 bp, Artificial Sequence
  Synthetic sequence
tcaacagttgctaggtgat

SEQ ID NO: 2363 - DNA, 20 bp, Artificial Sequence
  Synthetic sequence
gtcaacagttgctaggtgat

SEQ ID NO: 2364 - DNA, 20 bp, Artificial Sequence
  Synthetic sequence
gtcaacagttgctaggtgat

SEQ ID NO: 2365 - DNA, 19 bp, Artificial Sequence
  Synthetic sequence
gtcaacagttgctaggtga

SEQ ID NO: 2366 - DNA, 20 bp, Artificial Sequence
  Synthetic sequence
gtcaacagttgctaggtgat

SEQ ID NO: 2367 - DNA, 18 bp, Artificial Sequence
  Synthetic sequence
gtcaacagttgctaggtg

SEQ ID NO: 2368 - DNA, 18 bp, Artificial Sequence
  Synthetic sequence
caacagttgctaggtgat

SEQ ID NO: 2369 - DNA, 20 bp, Artificial Sequence
  Synthetic sequence
gtcaacagttgctaggtgat

SEQ ID NO: 2370 - DNA, 19 bp, Artificial Sequence
  Synthetic sequence
gtcaacagttgctaggtga

SEQ ID NO: 2371 - DNA, 18 bp, Artificial Sequence
  Synthetic sequence
gtcaacagttgctaggtg

SEQ ID NO: 2372 - DNA, 18 bp, Artificial Sequence
  Synthetic sequence
caacagttgctaggtgat

SEQ ID NO: 2373 - DNA, 17 bp, Artificial Sequence
  Synthetic sequence
gtcaacagttgctaggt

SEQ ID NO: 2374 - DNA, 17 bp, Artificial Sequence
  Synthetic sequence
aacagttgctaggtgat

SEQ ID NO: 2375 - DNA, 19 bp, Artificial Sequence
  Synthetic sequence
tcaacagttgctaggtgat

SEQ ID NO: 2376 - DNA, 18 bp, Artificial Sequence
  Synthetic sequence
tcaacagttgctaggtga

SEQ ID NO: 2377 - DNA, 17 bp, Artificial Sequence
  Synthetic sequence
tcaacagttgctaggtg

SEQ ID NO: 2378 - DNA, 20 bp, Artificial Sequence
  Synthetic sequence
gtcaacagttgctaggtgat

SEQ ID NO: 2379 - DNA, 20 bp, Artificial Sequence
  Synthetic sequence
gtcaacagttgctaggtgat

SEQ ID NO: 2380 - DNA, 20 bp, Artificial Sequence
  Synthetic sequence
gtcaacagttgctaggtgat

SEQ ID NO: 2381 - DNA, 20 bp, Artificial Sequence
  Synthetic sequence
gtcaacagttgctaggtgat

SEQ ID NO: 2382 - DNA, 20 bp, Artificial Sequence
  Synthetic sequence
gtcaacagttgctaggtgat

SEQ ID NO: 2383 - DNA, 20 bp, Artificial Sequence
  Synthetic sequence
gtcaacagttgctaggtgat

SEQ ID NO: 2384 - DNA, 20 bp, Artificial Sequence
  Synthetic sequence
gtcaacagttgctaggtgat

SEQ ID NO: 2385 - DNA, 20 bp, Artificial Sequence
  Synthetic sequence
gtcaacagttgctaggtgat

SEQ ID NO: 2386 - DNA, 20 bp, Artificial Sequence
  Synthetic sequence
gtcaacagttgctaggtgat

SEQ ID NO: 2387 - DNA, 20 bp, Artificial Sequence
  Synthetic sequence
gtcaacagttgctaggtgat

SEQ ID NO: 2388 - DNA, 20 bp, Artificial Sequence
  Synthetic sequence
gtcaacagttgctaggtgat

SEQ ID NO: 2389 - DNA, 20 bp, Artificial Sequence
  Synthetic sequence
gtcaacagttgctaggtgat

SEQ ID NO: 2390 - DNA, 20 bp, Artificial Sequence
  Synthetic sequence
gtcaacagttgctaggtgat

SEQ ID NO: 2391 - DNA, 20 bp, Artificial Sequence
  Synthetic sequence
gtcaacagttgctaggtgat

SEQ ID NO: 2392 - DNA, 20 bp, Artificial Sequence
  Synthetic sequence
gtcaacagttgctaggtgat

SEQ ID NO: 2393 - DNA, 21 bp, Artificial Sequence
  Synthetic sequence
gtcaacagttgctaggtgatg

SEQ ID NO: 2394 - DNA, 21 bp, Artificial Sequence
  Synthetic sequence
gtcaacagttgctaggtgatg

SEQ ID NO: 2395 - DNA, 21 bp, Artificial Sequence
  Synthetic sequence
gtcaacagttgctaggtgatg

SEQ ID NO: 2396 - DNA, 21 bp, Artificial Sequence
  Synthetic sequence
gtcaacagttgctaggtgatg

SEQ ID NO: 2397 - DNA, 21 bp, Artificial Sequence
  Synthetic sequence
gtcaacagttgctaggtgatg

SEQ ID NO: 2398 - DNA, 21 bp, Artificial Sequence
  Synthetic sequence
gtcaacagttgctaggtgatg

SEQ ID NO: 2399 - DNA, 21 bp, Artificial Sequence
  Synthetic sequence
gtcaacagttgctaggtgatg

SEQ ID NO: 2400 - DNA, 21 bp, Artificial Sequence
  Synthetic sequence
gtcaacagttgctaggtgatg

SEQ ID NO: 2401 - DNA, 21 bp, Artificial Sequence
  Synthetic sequence
gtcaacagttgctaggtgatg

SEQ ID NO: 2402 - DNA, 21 bp, Artificial Sequence
  Synthetic sequence
gtcaacagttgctaggtgatg

SEQ ID NO: 2403 - DNA, 21 bp, Artificial Sequence
  Synthetic sequence
gtcaacagttgctaggtgatg

SEQ ID NO: 2404 - DNA, 21 bp, Artificial Sequence
  Synthetic sequence
gtcaacagttgctaggtgatg

SEQ ID NO: 2405 - DNA, 21 bp, Artificial Sequence
  Synthetic sequence
gtcaacagttgctaggtgatg

SEQ ID NO: 2406 - DNA, 21 bp, Artificial Sequence
  Synthetic sequence
gtcaacagttgctaggtgatg

SEQ ID NO: 2407 - DNA, 21 bp, Artificial Sequence
  Synthetic sequence
gtcaacagttgctaggtgatg

SEQ ID NO: 2408 - DNA, 21 bp, Artificial Sequence
  Synthetic sequence
gtcaacagttgctaggtgatg

SEQ ID NO: 2409 - DNA, 22 bp, Artificial Sequence
  Synthetic sequence
gtcaacagttgctaggtgatgc

SEQ ID NO: 2410 - DNA, 22 bp, Artificial Sequence
  Synthetic sequence
gtcaacagttgctaggtgatgc

SEQ ID NO: 2411 - DNA, 22 bp, Artificial Sequence
  Synthetic sequence
gtcaacagttgctaggtgatgc

SEQ ID NO: 2412 - DNA, 22 bp, Artificial Sequence
  Synthetic sequence
gtcaacagttgctaggtgatgc

SEQ ID NO: 2413 - DNA, 22 bp, Artificial Sequence
  Synthetic sequence
gtcaacagttgctaggtgatgc

SEQ ID NO: 2414 - DNA, 22 bp, Artificial Sequence
  Synthetic sequence
gtcaacagttgctaggtgatgc

SEQ ID NO: 2415 - DNA, 22 bp, Artificial Sequence
  Synthetic sequence
gtcaacagttgctaggtgatgc

SEQ ID NO: 2416 - DNA, 22 bp, Artificial Sequence
  Synthetic sequence
gtcaacagttgctaggtgatgc

SEQ ID NO: 2417 - DNA, 22 bp, Artificial Sequence
  Synthetic sequence
gtcaacagttgctaggtgatgc

SEQ ID NO: 2418 - DNA, 22 bp, Artificial Sequence
  Synthetic sequence
gtcaacagttgctaggtgatgc

SEQ ID NO: 2419 - DNA, 22 bp, Artificial Sequence
  Synthetic sequence
gtcaacagttgctaggtgatgc

SEQ ID NO: 2420 - DNA, 22 bp, Artificial Sequence
  Synthetic sequence
gtcaacagttgctaggtgatgc

SEQ ID NO: 2421 - DNA, 22 bp, Artificial Sequence
  Synthetic sequence
gtcaacagttgctaggtgatgc

SEQ ID NO: 2422 - DNA, 22 bp, Artificial Sequence
  Synthetic sequence
gtcaacagttgctaggtgatgc

SEQ ID NO: 2423 - DNA, 22 bp, Artificial Sequence
  Synthetic sequence
gtcaacagttgctaggtgatgc

SEQ ID NO: 2424 - DNA, 22 bp, Artificial Sequence
  Synthetic sequence
gtcaacagttgctaggtgatgc

SEQ ID NO: 2425 - DNA, 23 bp, Artificial Sequence
  Synthetic sequence
gtcaacagttgctaggtgatgca

SEQ ID NO: 2426 - DNA, 23 bp, Artificial Sequence
  Synthetic sequence
gtcaacagttgctaggtgatgca

SEQ ID NO: 2427 - DNA, 23 bp, Artificial Sequence
  Synthetic sequence
gtcaacagttgctaggtgatgca

SEQ ID NO: 2428 - DNA, 23 bp, Artificial Sequence
  Synthetic sequence
gtcaacagttgctaggtgatgca

SEQ ID NO: 2429 - DNA, 23 bp, Artificial Sequence
  Synthetic sequence
gtcaacagttgctaggtgatgca

SEQ ID NO: 2430 - DNA, 23 bp, Artificial Sequence
  Synthetic sequence
gtcaacagttgctaggtgatgca

SEQ ID NO: 2431 - DNA, 23 bp, Artificial Sequence
  Synthetic sequence
gtcaacagttgctaggtgatgca

SEQ ID NO: 2432 - DNA, 23 bp, Artificial Sequence
  Synthetic sequence
gtcaacagttgctaggtgatgca

SEQ ID NO: 2433 - DNA, 23 bp, Artificial Sequence
  Synthetic sequence
gtcaacagttgctaggtgatgca

SEQ ID NO: 2434 - DNA, 23 bp, Artificial Sequence
  Synthetic sequence
gtcaacagttgctaggtgatgca

SEQ ID NO: 2435 - DNA, 23 bp, Artificial Sequence
  Synthetic sequence
gtcaacagttgctaggtgatgca

SEQ ID NO: 2436 - DNA, 23 bp, Artificial Sequence
  Synthetic sequence
gtcaacagttgctaggtgatgca

SEQ ID NO: 2437 - DNA, 23 bp, Artificial Sequence
  Synthetic sequence
gtcaacagttgctaggtgatgca

SEQ ID NO: 2438 - DNA, 23 bp, Artificial Sequence
  Synthetic sequence
gtcaacagttgctaggtgatgca

SEQ ID NO: 2439 - DNA, 23 bp, Artificial Sequence
  Synthetic sequence
gtcaacagttgctaggtgatgca

SEQ ID NO: 2440 - DNA, 23 bp, Artificial Sequence
  Synthetic sequence
gtcaacagttgctaggtgatgca

SEQ ID NO: 2441 - DNA, 21 bp, Artificial Sequence
  Synthetic sequence
gtcaacagttgctaggtgatg

SEQ ID NO: 2442 - DNA, 21 bp, Artificial Sequence
  Synthetic sequence
gtcaacagttgctaggtgatg

SEQ ID NO: 2443 - DNA, 21 bp, Artificial Sequence
  Synthetic sequence
gtcaacagttgctaggtgatg

SEQ ID NO: 2444 - DNA, 21 bp, Artificial Sequence
  Synthetic sequence
gtcaacagttgctaggtgatg

SEQ ID NO: 2445 - DNA, 21 bp, Artificial Sequence
  Synthetic sequence
gtcaacagttgctaggtgatg

SEQ ID NO: 2446 - DNA, 21 bp, Artificial Sequence
  Synthetic sequence
gtcaacagttgctaggtgatg

SEQ ID NO: 2447 - DNA, 21 bp, Artificial Sequence
  Synthetic sequence
gtcaacagttgctaggtgatg

SEQ ID NO: 2448 - DNA, 21 bp, Artificial Sequence
  Synthetic sequence
gtcaacagttgctaggtgatg

SEQ ID NO: 2449 - DNA, 21 bp, Artificial Sequence
  Synthetic sequence
gtcaacagttgctaggtgatg

SEQ ID NO: 2450 - DNA, 21 bp, Artificial Sequence
  Synthetic sequence
gtcaacagttgctaggtgatg

SEQ ID NO: 2451 - DNA, 21 bp, Artificial Sequence
  Synthetic sequence
gtcaacagttgctaggtgatg

SEQ ID NO: 2452 - DNA, 21 bp, Artificial Sequence
  Synthetic sequence
gtcaacagttgctaggtgatg

SEQ ID NO: 2453 - DNA, 21 bp, Artificial Sequence
  Synthetic sequence
gtcaacagttgctaggtgatg

SEQ ID NO: 2454 - DNA, 21 bp, Artificial Sequence
  Synthetic sequence
gtcaacagttgctaggtgatg

SEQ ID NO: 2455 - DNA, 21 bp, Artificial Sequence
  Synthetic sequence
gtcaacagttgctaggtgatg

SEQ ID NO: 2456 - DNA, 21 bp, Artificial Sequence
  Synthetic sequence
gtcaacagttgctaggtgatg

SEQ ID NO: 2457 - DNA, 22 bp, Artificial Sequence
  Synthetic sequence
gtcaacagttgctaggtgatgc

SEQ ID NO: 2458 - DNA, 22 bp, Artificial Sequence
  Synthetic sequence
gtcaacagttgctaggtgatgc

SEQ ID NO: 2459 - DNA, 22 bp, Artificial Sequence
  Synthetic sequence
gtcaacagttgctaggtgatgc

SEQ ID NO: 2460 - DNA, 22 bp, Artificial Sequence
  Synthetic sequence
gtcaacagttgctaggtgatgc

SEQ ID NO: 2461 - DNA, 22 bp, Artificial Sequence
  Synthetic sequence
gtcaacagttgctaggtgatgc

SEQ ID NO: 2462 - DNA, 22 bp, Artificial Sequence
  Synthetic sequence
gtcaacagttgctaggtgatgc

SEQ ID NO: 2463 - DNA, 22 bp, Artificial Sequence
  Synthetic sequence
gtcaacagttgctaggtgatgc

SEQ ID NO: 2464 - DNA, 22 bp, Artificial Sequence
  Synthetic sequence
gtcaacagttgctaggtgatgc

SEQ ID NO: 2465 - DNA, 22 bp, Artificial Sequence
  Synthetic sequence
gtcaacagttgctaggtgatgc

SEQ ID NO: 2466 - DNA, 22 bp, Artificial Sequence
  Synthetic sequence
gtcaacagttgctaggtgatgc

SEQ ID NO: 2467 - DNA, 22 bp, Artificial Sequence
  Synthetic sequence
gtcaacagttgctaggtgatgc

SEQ ID NO: 2468 - DNA, 22 bp, Artificial Sequence
  Synthetic sequence
gtcaacagttgctaggtgatgc

SEQ ID NO: 2469 - DNA, 22 bp, Artificial Sequence
  Synthetic sequence
gtcaacagttgctaggtgatgc

SEQ ID NO: 2470 - DNA, 22 bp, Artificial Sequence
  Synthetic sequence
gtcaacagttgctaggtgatgc

SEQ ID NO: 2471 - DNA, 22 bp, Artificial Sequence
  Synthetic sequence
gtcaacagttgctaggtgatgc

SEQ ID NO: 2472 - DNA, 22 bp, Artificial Sequence
  Synthetic sequence
gtcaacagttgctaggtgatgc

SEQ ID NO: 2473 - DNA, 20 bp, Artificial Sequence
  Synthetic sequence
ttcttcttgtacagttggtc

SEQ ID NO: 2474 - DNA, 20 bp, Artificial Sequence
  Synthetic sequence
ttcttcttgtacagttggtc

SEQ ID NO: 2475 - DNA, 20 bp, Artificial Sequence
  Synthetic sequence
ttcttcttgtacagttggtc

SEQ ID NO: 2476 - DNA, 20 bp, Artificial Sequence
  Synthetic sequence
ttcttcttgtacagttggtc

SEQ ID NO: 2477 - DNA, 20 bp, Artificial Sequence
  Synthetic sequence
ttcttcttgtacagttggtc

SEQ ID NO: 2478 - DNA, 20 bp, Artificial Sequence
  Synthetic sequence
ttcttcttgtacagttggtc

SEQ ID NO: 2479 - DNA, 20 bp, Artificial Sequence
  Synthetic sequence
ttcttcttgtacagttggtc

SEQ ID NO: 2480 - DNA, 20 bp, Artificial Sequence
  Synthetic sequence
ttcttcttgtacagttggtc

SEQ ID NO: 2481 - DNA, 20 bp, Artificial Sequence
  Synthetic sequence
ttcttcttgtacagttggtc

SEQ ID NO: 2482 - DNA, 20 bp, Artificial Sequence
  Synthetic sequence
ttcttcttgtacagttggtc

SEQ ID NO: 2483 - DNA, 20 bp, Artificial Sequence
  Synthetic sequence
ttcttcttgtacagttggtc

SEQ ID NO: 2484 - DNA, 20 bp, Artificial Sequence
  Synthetic sequence
ttcttcttgtacagttggtc

SEQ ID NO: 2485 - DNA, 20 bp, Artificial Sequence
  Synthetic sequence
ttcttcttgtacagttggtc

SEQ ID NO: 2486 - DNA, 20 bp, Artificial Sequence
  Synthetic sequence
ttcttcttgtacagttggtc

SEQ ID NO: 2487 - DNA, 20 bp, Artificial Sequence
  Synthetic sequence
ttcttcttgtacagttggtc

SEQ ID NO: 2488 - DNA, 20 bp, Artificial Sequence
  Synthetic sequence
ttcttcttgtacagttggtc

SEQ ID NO: 2489 - DNA, 20 bp, Artificial Sequence
  Synthetic sequence
ttcttcttgtacagttggtc

SEQ ID NO: 2490 - DNA, 20 bp, Artificial Sequence
  Synthetic sequence
ttcttcttgtacagttggtc

SEQ ID NO: 2491 - DNA, 20 bp, Artificial Sequence
  Synthetic sequence
ttcttcttgtacagttggtc

SEQ ID NO: 2492 - DNA, 20 bp, Artificial Sequence
  Synthetic sequence
ttcttcttgtacagttggtc

SEQ ID NO: 2493 - DNA, 20 bp, Artificial Sequence
  Synthetic sequence
ttcttcttgtacagttggtc

SEQ ID NO: 2494 - DNA, 20 bp, Artificial Sequence
  Synthetic sequence
ttcttcttgtacagttggtc

SEQ ID NO: 2495 - DNA, 19 bp, Artificial Sequence
  Synthetic sequence
ttcttcttgtacagttggt

SEQ ID NO: 2496 - DNA, 19 bp, Artificial Sequence
  Synthetic sequence
ttcttcttgtacagttggt

SEQ ID NO: 2497 - DNA, 19 bp, Artificial Sequence
  Synthetic sequence
ttcttcttgtacagttggt

SEQ ID NO: 2498 - DNA, 19 bp, Artificial Sequence
  Synthetic sequence
ttcttcttgtacagttggt

SEQ ID NO: 2499 - DNA, 19 bp, Artificial Sequence
  Synthetic sequence
ttcttcttgtacagttggt

SEQ ID NO: 2500 - DNA, 19 bp, Artificial Sequence
  Synthetic sequence
tcttcttgtacagttggtc

SEQ ID NO: 2501 - DNA, 19 bp, Artificial Sequence
  Synthetic sequence
tcttcttgtacagttggtc

SEQ ID NO: 2502 - DNA, 19 bp, Artificial Sequence
  Synthetic sequence
tcttcttgtacagttggtc

SEQ ID NO: 2503 - DNA, 19 bp, Artificial Sequence
  Synthetic sequence
tcttcttgtacagttggtc

SEQ ID NO: 2504 - DNA, 19 bp, Artificial Sequence
  Synthetic sequence
tcttcttgtacagttggtc

SEQ ID NO: 2505 - DNA, 20 bp, Artificial Sequence
  Synthetic sequence
ttcttcttgtacagttggtc

SEQ ID NO: 2506 - DNA, 20 bp, Artificial Sequence
  Synthetic sequence
ttcttcttgtacagttggtc

SEQ ID NO: 2507 - DNA, 20 bp, Artificial Sequence
  Synthetic sequence
ttcttcttgtacagttggtc

SEQ ID NO: 2508 - DNA, 20 bp, Artificial Sequence
  Synthetic sequence
ttcttcttgtacagttggtc

SEQ ID NO: 2509 - DNA, 20 bp, Artificial Sequence
  Synthetic sequence
ttcttcttgtacagttggtc

SEQ ID NO: 2510 - DNA, 20 bp, Artificial Sequence
  Synthetic sequence
ttcttcttgtacagttggtc

SEQ ID NO: 2511 - DNA, 20 bp, Artificial Sequence
  Synthetic sequence
ttcttcttgtacagttggtc

SEQ ID NO: 2512 - DNA, 20 bp, Artificial Sequence
  Synthetic sequence
ttcttcttgtacagttggtc

SEQ ID NO: 2513 - DNA, 19 bp, Artificial Sequence
  Synthetic sequence
ttcttcttgtacagttggt

SEQ ID NO: 2514 - DNA, 19 bp, Artificial Sequence
  Synthetic sequence
ttcttcttgtacagttggt

SEQ ID NO: 2515 - DNA, 19 bp, Artificial Sequence
  Synthetic sequence
ttcttcttgtacagttggt

SEQ ID NO: 2516 - DNA, 19 bp, Artificial Sequence
  Synthetic sequence
ttcttcttgtacagttggt

SEQ ID NO: 2517 - DNA, 20 bp, Artificial Sequence
  Synthetic sequence
ttcttcttgtacagttggtc

SEQ ID NO: 2518 - DNA, 20 bp, Artificial Sequence
  Synthetic sequence
ttcttcttgtacagttggtc

SEQ ID NO: 2519 - DNA, 20 bp, Artificial Sequence
  Synthetic sequence
ttcttcttgtacagttggtc

SEQ ID NO: 2520 - DNA, 18 bp, Artificial Sequence
  Synthetic sequence
ttcttcttgtacagttgg

SEQ ID NO: 2521 - DNA, 18 bp, Artificial Sequence
  Synthetic sequence
ttcttcttgtacagttgg

SEQ ID NO: 2522 - DNA, 18 bp, Artificial Sequence
  Synthetic sequence
ttcttcttgtacagttgg

SEQ ID NO: 2523 - DNA, 18 bp, Artificial Sequence
  Synthetic sequence
ttcttcttgtacagttgg

SEQ ID NO: 2524 - DNA, 18 bp, Artificial Sequence
  Synthetic sequence
cttcttgtacagttggtc

SEQ ID NO: 2525 - DNA, 18 bp, Artificial Sequence
  Synthetic sequence
cttcttgtacagttggtc

SEQ ID NO: 2526 - DNA, 18 bp, Artificial Sequence
  Synthetic sequence
cttcttgtacagttggtc

SEQ ID NO: 2527 - DNA, 18 bp, Artificial Sequence
  Synthetic sequence
cttcttgtacagttggtc

SEQ ID NO: 2528 - DNA, 20 bp, Artificial Sequence
  Synthetic sequence
ttcttcttgtacagttggtc

SEQ ID NO: 2529 - DNA, 20 bp, Artificial Sequence
  Synthetic sequence
ttcttcttgtacagttggtc

SEQ ID NO: 2530 - DNA, 20 bp, Artificial Sequence
  Synthetic sequence
ttcttcttgtacagttggtc

SEQ ID NO: 2531 - DNA, 20 bp, Artificial Sequence
  Synthetic sequence
ttcttcttgtacagttggtc

SEQ ID NO: 2532 - DNA, 20 bp, Artificial Sequence
  Synthetic sequence
ttcttcttgtacagttggtc

SEQ ID NO: 2533 - DNA, 20 bp, Artificial Sequence
  Synthetic sequence
ttcttcttgtacagttggtc

SEQ ID NO: 2534 - DNA, 19 bp, Artificial Sequence
  Synthetic sequence
ttcttcttgtacagttggt

SEQ ID NO: 2535 - DNA, 19 bp, Artificial Sequence
  Synthetic sequence
ttcttcttgtacagttggt

SEQ ID NO: 2536 - DNA, 19 bp, Artificial Sequence
  Synthetic sequence
ttcttcttgtacagttggt

SEQ ID NO: 2537 - DNA, 19 bp, Artificial Sequence
  Synthetic sequence
tcttcttgtacagttggtc

SEQ ID NO: 2538 - DNA, 19 bp, Artificial Sequence
  Synthetic sequence
tcttcttgtacagttggtc

SEQ ID NO: 2539 - DNA, 19 bp, Artificial Sequence
  Synthetic sequence
tcttcttgtacagttggtc

SEQ ID NO: 2540 - DNA, 18 bp, Artificial Sequence
  Synthetic sequence
ttcttcttgtacagttgg

SEQ ID NO: 2541 - DNA, 18 bp, Artificial Sequence
  Synthetic sequence
ttcttcttgtacagttgg

SEQ ID NO: 2542 - DNA, 18 bp, Artificial Sequence
  Synthetic sequence
ttcttcttgtacagttgg

SEQ ID NO: 2543 - DNA, 18 bp, Artificial Sequence
  Synthetic sequence
cttcttgtacagttggtc

SEQ ID NO: 2544 - DNA, 18 bp, Artificial Sequence
  Synthetic sequence
cttcttgtacagttggtc

SEQ ID NO: 2545 - DNA, 18 bp, Artificial Sequence
  Synthetic sequence
cttcttgtacagttggtc

SEQ ID NO: 2546 - DNA, 17 bp, Artificial Sequence
  Synthetic sequence
ttcttcttgtacagttg

SEQ ID NO: 2547 - DNA, 17 bp, Artificial Sequence
  Synthetic sequence
ttcttcttgtacagttg

SEQ ID NO: 2548 - DNA, 17 bp, Artificial Sequence
  Synthetic sequence
ttcttcttgtacagttg

SEQ ID NO: 2549 - DNA, 17 bp, Artificial Sequence
  Synthetic sequence
ttcttgtacagttggtc

SEQ ID NO: 2550 - DNA, 17 bp, Artificial Sequence
  Synthetic sequence
ttcttgtacagttggtc

SEQ ID NO: 2551 - DNA, 17 bp, Artificial Sequence
  Synthetic sequence
ttcttgtacagttggtc

SEQ ID NO: 2552 - DNA, 19 bp, Artificial Sequence
  Synthetic sequence
tcttcttgtacagttggtc

SEQ ID NO: 2553 - DNA, 19 bp, Artificial Sequence
  Synthetic sequence
tcttcttgtacagttggtc

SEQ ID NO: 2554 - DNA, 19 bp, Artificial Sequence
  Synthetic sequence
ttcttcttgtacagttggt

SEQ ID NO: 2555 - DNA, 19 bp, Artificial Sequence
  Synthetic sequence
ttcttcttgtacagttggt

SEQ ID NO: 2556 - DNA, 18 bp, Artificial Sequence
  Synthetic sequence
tcttcttgtacagttggt

SEQ ID NO: 2557 - DNA, 18 bp, Artificial Sequence
  Synthetic sequence
tcttcttgtacagttggt

SEQ ID NO: 2558 - DNA, 18 bp, Artificial Sequence
  Synthetic sequence
tcttcttgtacagttggt

SEQ ID NO: 2559 - DNA, 18 bp, Artificial Sequence
  Synthetic sequence
tcttcttgtacagttggt

SEQ ID NO: 2560 - DNA, 17 bp, Artificial Sequence
  Synthetic sequence
tcttcttgtacagttgg

SEQ ID NO: 2561 - DNA, 17 bp, Artificial Sequence
  Synthetic sequence
tcttcttgtacagttgg

SEQ ID NO: 2562 - DNA, 17 bp, Artificial Sequence
  Synthetic sequence
tcttcttgtacagttgg

SEQ ID NO: 2563 - DNA, 20 bp, Artificial Sequence
  Synthetic sequence
ttcttcttgtacagttggtc

SEQ ID NO: 2564 - DNA, 20 bp, Artificial Sequence
  Synthetic sequence
ttcttcttgtacagttggtc

SEQ ID NO: 2565 - DNA, 20 bp, Artificial Sequence
  Synthetic sequence
ttcttcttgtacagttggtc

SEQ ID NO: 2566 - DNA, 20 bp, Artificial Sequence
  Synthetic sequence
ttcttcttgtacagttggtc

SEQ ID NO: 2567 - DNA, 19 bp, Artificial Sequence
  Synthetic sequence
ttcttcttgtacagttggt

SEQ ID NO: 2568 - DNA, 19 bp, Artificial Sequence
  Synthetic sequence
tcttcttgtacagttggtc

SEQ ID NO: 2569 - DNA, 20 bp, Artificial Sequence
  Synthetic sequence
ttcttcttgtacagttggtc

SEQ ID NO: 2570 - DNA, 20 bp, Artificial Sequence
  Synthetic sequence
ttcttcttgtacagttggtc

SEQ ID NO: 2571 - DNA, 19 bp, Artificial Sequence
  Synthetic sequence
ttcttcttgtacagttggt

SEQ ID NO: 2572 - DNA, 20 bp, Artificial Sequence
  Synthetic sequence
ttcttcttgtacagttggtc

SEQ ID NO: 2573 - DNA, 18 bp, Artificial Sequence
  Synthetic sequence
ttcttcttgtacagttgg

SEQ ID NO: 2574 - DNA, 18 bp, Artificial Sequence
  Synthetic sequence
cttcttgtacagttggtc

SEQ ID NO: 2575 - DNA, 20 bp, Artificial Sequence
  Synthetic sequence
ttcttcttgtacagttggtc

SEQ ID NO: 2576 - DNA, 19 bp, Artificial Sequence
  Synthetic sequence
ttcttcttgtacagttggt

SEQ ID NO: 2577 - DNA, 18 bp, Artificial Sequence
  Synthetic sequence
ttcttcttgtacagttgg

SEQ ID NO: 2578 - DNA, 18 bp, Artificial Sequence
  Synthetic sequence
cttcttgtacagttggtc

SEQ ID NO: 2579 - DNA, 17 bp, Artificial Sequence
  Synthetic sequence
ttcttcttgtacagttg

SEQ ID NO: 2580 - DNA, 17 bp, Artificial Sequence
  Synthetic sequence
ttcttgtacagttggtc

SEQ ID NO: 2581 - DNA, 19 bp, Artificial Sequence
  Synthetic sequence
tcttcttgtacagttggtc

SEQ ID NO: 2582 - DNA, 18 bp, Artificial Sequence
  Synthetic sequence
tcttcttgtacagttggt

SEQ ID NO: 2583 - DNA, 17 bp, Artificial Sequence
  Synthetic sequence
tcttcttgtacagttgg

SEQ ID NO: 2584 - DNA, 20 bp, Artificial Sequence
  Synthetic sequence
ttcttcttgtacagttggtc

SEQ ID NO: 2585 - DNA, 20 bp, Artificial Sequence
  Synthetic sequence
ttcttcttgtacagttggtc

SEQ ID NO: 2586 - DNA, 20 bp, Artificial Sequence
  Synthetic sequence
ttcttcttgtacagttggtc

SEQ ID NO: 2587 - DNA, 20 bp, Artificial Sequence
  Synthetic sequence
ttcttcttgtacagttggtc

SEQ ID NO: 2588 - DNA, 20 bp, Artificial Sequence
  Synthetic sequence
ttcttcttgtacagttggtc

SEQ ID NO: 2589 - DNA, 20 bp, Artificial Sequence
  Synthetic sequence
ttcttcttgtacagttggtc

SEQ ID NO: 2590 - DNA, 20 bp, Artificial Sequence
  Synthetic sequence
ttcttcttgtacagttggtc

SEQ ID NO: 2591 - DNA, 20 bp, Artificial Sequence
  Synthetic sequence
ttcttcttgtacagttggtc

SEQ ID NO: 2592 - DNA, 20 bp, Artificial Sequence
  Synthetic sequence
ttcttcttgtacagttggtc

SEQ ID NO: 2593 - DNA, 20 bp, Artificial Sequence
  Synthetic sequence
ttcttcttgtacagttggtc

SEQ ID NO: 2594 - DNA, 20 bp, Artificial Sequence
  Synthetic sequence
ttcttcttgtacagttggtc

SEQ ID NO: 2595 - DNA, 20 bp, Artificial Sequence
  Synthetic sequence
ttcttcttgtacagttggtc

SEQ ID NO: 2596 - DNA, 20 bp, Artificial Sequence
  Synthetic sequence
ttcttcttgtacagttggtc

SEQ ID NO: 2597 - DNA, 20 bp, Artificial Sequence
  Synthetic sequence
ttcttcttgtacagttggtc

SEQ ID NO: 2598 - DNA, 20 bp, Artificial Sequence
  Synthetic sequence
ttcttcttgtacagttggtc

SEQ ID NO: 2599 - DNA, 21 bp, Artificial Sequence
  Synthetic sequence
ttcttcttgtacagttggtct

SEQ ID NO: 2600 - DNA, 21 bp, Artificial Sequence
  Synthetic sequence
ttcttcttgtacagttggtct

SEQ ID NO: 2601 - DNA, 21 bp, Artificial Sequence
  Synthetic sequence
ttcttcttgtacagttggtct

SEQ ID NO: 2602 - DNA, 21 bp, Artificial Sequence
  Synthetic sequence
ttcttcttgtacagttggtct

SEQ ID NO: 2603 - DNA, 21 bp, Artificial Sequence
  Synthetic sequence
ttcttcttgtacagttggtct

SEQ ID NO: 2604 - DNA, 21 bp, Artificial Sequence
  Synthetic sequence
ttcttcttgtacagttggtct

SEQ ID NO: 2605 - DNA, 21 bp, Artificial Sequence
  Synthetic sequence
ttcttcttgtacagttggtct

SEQ ID NO: 2606 - DNA, 21 bp, Artificial Sequence
  Synthetic sequence
ttcttcttgtacagttggtct

SEQ ID NO: 2607 - DNA, 21 bp, Artificial Sequence
  Synthetic sequence
ttcttcttgtacagttggtct

SEQ ID NO: 2608 - DNA, 21 bp, Artificial Sequence
  Synthetic sequence
ttcttcttgtacagttggtct

SEQ ID NO: 2609 - DNA, 21 bp, Artificial Sequence
  Synthetic sequence
ttcttcttgtacagttggtct

SEQ ID NO: 2610 - DNA, 21 bp, Artificial Sequence
  Synthetic sequence
ttcttcttgtacagttggtct

SEQ ID NO: 2611 - DNA, 21 bp, Artificial Sequence
  Synthetic sequence
ttcttcttgtacagttggtct

SEQ ID NO: 2612 - DNA, 21 bp, Artificial Sequence
  Synthetic sequence
ttcttcttgtacagttggtct

SEQ ID NO: 2613 - DNA, 21 bp, Artificial Sequence
  Synthetic sequence
ttcttcttgtacagttggtct

SEQ ID NO: 2614 - DNA, 21 bp, Artificial Sequence
  Synthetic sequence
ttcttcttgtacagttggtct

SEQ ID NO: 2615 - DNA, 22 bp, Artificial Sequence
  Synthetic sequence
ttcttcttgtacagttggtctg

SEQ ID NO: 2616 - DNA, 22 bp, Artificial Sequence
  Synthetic sequence
ttcttcttgtacagttggtctg

SEQ ID NO: 2617 - DNA, 22 bp, Artificial Sequence
  Synthetic sequence
ttcttcttgtacagttggtctg

SEQ ID NO: 2618 - DNA, 22 bp, Artificial Sequence
  Synthetic sequence
ttcttcttgtacagttggtctg

SEQ ID NO: 2619 - DNA, 22 bp, Artificial Sequence
  Synthetic sequence
ttcttcttgtacagttggtctg

SEQ ID NO: 2620 - DNA, 22 bp, Artificial Sequence
  Synthetic sequence
ttcttcttgtacagttggtctg

SEQ ID NO: 2621 - DNA, 22 bp, Artificial Sequence
  Synthetic sequence
ttcttcttgtacagttggtctg

SEQ ID NO: 2622 - DNA, 22 bp, Artificial Sequence
  Synthetic sequence
ttcttcttgtacagttggtctg

SEQ ID NO: 2623 - DNA, 22 bp, Artificial Sequence
  Synthetic sequence
ttcttcttgtacagttggtctg

SEQ ID NO: 2624 - DNA, 22 bp, Artificial Sequence
  Synthetic sequence
ttcttcttgtacagttggtctg

SEQ ID NO: 2625 - DNA, 22 bp, Artificial Sequence
  Synthetic sequence
ttcttcttgtacagttggtctg

SEQ ID NO: 2626 - DNA, 22 bp, Artificial Sequence
  Synthetic sequence
ttcttcttgtacagttggtctg

SEQ ID NO: 2627 - DNA, 22 bp, Artificial Sequence
  Synthetic sequence
ttcttcttgtacagttggtctg

SEQ ID NO: 2628 - DNA, 22 bp, Artificial Sequence
  Synthetic sequence
ttcttcttgtacagttggtctg

SEQ ID NO: 2629 - DNA, 22 bp, Artificial Sequence
  Synthetic sequence
ttcttcttgtacagttggtctg

SEQ ID NO: 2630 - DNA, 22 bp, Artificial Sequence
  Synthetic sequence
ttcttcttgtacagttggtctg

SEQ ID NO: 2631 - DNA, 23 bp, Artificial Sequence
  Synthetic sequence
ttcttcttgtacagttggtctgc

SEQ ID NO: 2632 - DNA, 23 bp, Artificial Sequence
  Synthetic sequence
ttcttcttgtacagttggtctgc

SEQ ID NO: 2633 - DNA, 23 bp, Artificial Sequence
  Synthetic sequence
ttcttcttgtacagttggtctgc

SEQ ID NO: 2634 - DNA, 23 bp, Artificial Sequence
  Synthetic sequence
ttcttcttgtacagttggtctgc

SEQ ID NO: 2635 - DNA, 23 bp, Artificial Sequence
  Synthetic sequence
ttcttcttgtacagttggtctgc

SEQ ID NO: 2636 - DNA, 23 bp, Artificial Sequence
  Synthetic sequence
ttcttcttgtacagttggtctgc

SEQ ID NO: 2637 - DNA, 23 bp, Artificial Sequence
  Synthetic sequence
ttcttcttgtacagttggtctgc

SEQ ID NO: 2638 - DNA, 23 bp, Artificial Sequence
  Synthetic sequence
ttcttcttgtacagttggtctgc

SEQ ID NO: 2639 - DNA, 23 bp, Artificial Sequence
  Synthetic sequence
ttcttcttgtacagttggtctgc

SEQ ID NO: 2640 - DNA, 23 bp, Artificial Sequence
  Synthetic sequence
ttcttcttgtacagttggtctgc

SEQ ID NO: 2641 - DNA, 23 bp, Artificial Sequence
  Synthetic sequence
ttcttcttgtacagttggtctgc

SEQ ID NO: 2642 - DNA, 23 bp, Artificial Sequence
  Synthetic sequence
ttcttcttgtacagttggtctgc

SEQ ID NO: 2643 - DNA, 23 bp, Artificial Sequence
  Synthetic sequence
ttcttcttgtacagttggtctgc

SEQ ID NO: 2644 - DNA, 23 bp, Artificial Sequence
  Synthetic sequence
ttcttcttgtacagttggtctgc

SEQ ID NO: 2645 - DNA, 23 bp, Artificial Sequence
  Synthetic sequence
ttcttcttgtacagttggtctgc

SEQ ID NO: 2646 - DNA, 23 bp, Artificial Sequence
  Synthetic sequence
ttcttcttgtacagttggtctgc

SEQ ID NO: 2647 - DNA, 21 bp, Artificial Sequence
  Synthetic sequence
ttcttcttgtacagttggtct

SEQ ID NO: 2648 - DNA, 21 bp, Artificial Sequence
  Synthetic sequence
ttcttcttgtacagttggtct

SEQ ID NO: 2649 - DNA, 21 bp, Artificial Sequence
  Synthetic sequence
ttcttcttgtacagttggtct

SEQ ID NO: 2650 - DNA, 21 bp, Artificial Sequence
  Synthetic sequence
ttcttcttgtacagttggtct

SEQ ID NO: 2651 - DNA, 21 bp, Artificial Sequence
  Synthetic sequence
ttcttcttgtacagttggtct

SEQ ID NO: 2652 - DNA, 21 bp, Artificial Sequence
  Synthetic sequence
ttcttcttgtacagttggtct

SEQ ID NO: 2653 - DNA, 21 bp, Artificial Sequence
  Synthetic sequence
ttcttcttgtacagttggtct

SEQ ID NO: 2654 - DNA, 21 bp, Artificial Sequence
  Synthetic sequence
ttcttcttgtacagttggtct

SEQ ID NO: 2655 - DNA, 21 bp, Artificial Sequence
  Synthetic sequence
ttcttcttgtacagttggtct

SEQ ID NO: 2656 - DNA, 21 bp, Artificial Sequence
  Synthetic sequence
ttcttcttgtacagttggtct

SEQ ID NO: 2657 - DNA, 21 bp, Artificial Sequence
  Synthetic sequence
ttcttcttgtacagttggtct

SEQ ID NO: 2658 - DNA, 21 bp, Artificial Sequence
  Synthetic sequence
ttcttcttgtacagttggtct

SEQ ID NO: 2659 - DNA, 21 bp, Artificial Sequence
  Synthetic sequence
ttcttcttgtacagttggtct

SEQ ID NO: 2660 - DNA, 21 bp, Artificial Sequence
  Synthetic sequence
ttcttcttgtacagttggtct

SEQ ID NO: 2661 - DNA, 21 bp, Artificial Sequence
  Synthetic sequence
ttcttcttgtacagttggtct

SEQ ID NO: 2662 - DNA, 21 bp, Artificial Sequence
  Synthetic sequence
ttcttcttgtacagttggtct

SEQ ID NO: 2663 - DNA, 22 bp, Artificial Sequence
  Synthetic sequence
ttcttcttgtacagttggtctg

SEQ ID NO: 2664 - DNA, 22 bp, Artificial Sequence
  Synthetic sequence
ttcttcttgtacagttggtctg

SEQ ID NO: 2665 - DNA, 22 bp, Artificial Sequence
  Synthetic sequence
ttcttcttgtacagttggtctg

SEQ ID NO: 2666 - DNA, 22 bp, Artificial Sequence
  Synthetic sequence
ttcttcttgtacagttggtctg

SEQ ID NO: 2667 - DNA, 22 bp, Artificial Sequence
  Synthetic sequence
ttcttcttgtacagttggtctg

SEQ ID NO: 2668 - DNA, 22 bp, Artificial Sequence
  Synthetic sequence
ttcttcttgtacagttggtctg

SEQ ID NO: 2669 - DNA, 22 bp, Artificial Sequence
  Synthetic sequence
ttcttcttgtacagttggtctg

SEQ ID NO: 2670 - DNA, 22 bp, Artificial Sequence
  Synthetic sequence
ttcttcttgtacagttggtctg

SEQ ID NO: 2671 - DNA, 22 bp, Artificial Sequence
  Synthetic sequence
ttcttcttgtacagttggtctg

SEQ ID NO: 2672 - DNA, 22 bp, Artificial Sequence
  Synthetic sequence
ttcttcttgtacagttggtctg

SEQ ID NO: 2673 - DNA, 22 bp, Artificial Sequence
  Synthetic sequence
ttcttcttgtacagttggtctg

SEQ ID NO: 2674 - DNA, 22 bp, Artificial Sequence
  Synthetic sequence
ttcttcttgtacagttggtctg

SEQ ID NO: 2675 - DNA, 22 bp, Artificial Sequence
  Synthetic sequence
ttcttcttgtacagttggtctg

SEQ ID NO: 2676 - DNA, 22 bp, Artificial Sequence
  Synthetic sequence
ttcttcttgtacagttggtctg

SEQ ID NO: 2677 - DNA, 22 bp, Artificial Sequence
  Synthetic sequence
ttcttcttgtacagttggtctg

SEQ ID NO: 2678 - DNA, 22 bp, Artificial Sequence
  Synthetic sequence
ttcttcttgtacagttggtctg

SEQ ID NO: 2679 - DNA, 20 bp, Artificial Sequence
  Synthetic sequence
ctttcttcttgtacagttgg

SEQ ID NO: 2680 - DNA, 20 bp, Artificial Sequence
  Synthetic sequence
ctttcttcttgtacagttgg

SEQ ID NO: 2681 - DNA, 20 bp, Artificial Sequence
  Synthetic sequence
ctttcttcttgtacagttgg

SEQ ID NO: 2682 - DNA, 20 bp, Artificial Sequence
  Synthetic sequence
ctttcttcttgtacagttgg

SEQ ID NO: 2683 - DNA, 20 bp, Artificial Sequence
  Synthetic sequence
ctttcttcttgtacagttgg

SEQ ID NO: 2684 - DNA, 20 bp, Artificial Sequence
  Synthetic sequence
ctttcttcttgtacagttgg

SEQ ID NO: 2685 - DNA, 20 bp, Artificial Sequence
  Synthetic sequence
ctttcttcttgtacagttgg

SEQ ID NO: 2686 - DNA, 20 bp, Artificial Sequence
  Synthetic sequence
ctttcttcttgtacagttgg

SEQ ID NO: 2687 - DNA, 20 bp, Artificial Sequence
  Synthetic sequence
ctttcttcttgtacagttgg

SEQ ID NO: 2688 - DNA, 20 bp, Artificial Sequence
  Synthetic sequence
ctttcttcttgtacagttgg

SEQ ID NO: 2689 - DNA, 20 bp, Artificial Sequence
  Synthetic sequence
ctttcttcttgtacagttgg

SEQ ID NO: 2690 - DNA, 20 bp, Artificial Sequence
  Synthetic sequence
ctttcttcttgtacagttgg

SEQ ID NO: 2691 - DNA, 20 bp, Artificial Sequence
  Synthetic sequence
ctttcttcttgtacagttgg

SEQ ID NO: 2692 - DNA, 20 bp, Artificial Sequence
  Synthetic sequence
ctttcttcttgtacagttgg

SEQ ID NO: 2693 - DNA, 20 bp, Artificial Sequence
  Synthetic sequence
ctttcttcttgtacagttgg

SEQ ID NO: 2694 - DNA, 20 bp, Artificial Sequence
  Synthetic sequence
ctttcttcttgtacagttgg

SEQ ID NO: 2695 - DNA, 20 bp, Artificial Sequence
  Synthetic sequence
ctttcttcttgtacagttgg

SEQ ID NO: 2696 - DNA, 20 bp, Artificial Sequence
  Synthetic sequence
ctttcttcttgtacagttgg

SEQ ID NO: 2697 - DNA, 20 bp, Artificial Sequence
  Synthetic sequence
ctttcttcttgtacagttgg

SEQ ID NO: 2698 - DNA, 20 bp, Artificial Sequence
  Synthetic sequence
ctttcttcttgtacagttgg

SEQ ID NO: 2699 - DNA, 20 bp, Artificial Sequence
  Synthetic sequence
ctttcttcttgtacagttgg

SEQ ID NO: 2700 - DNA, 20 bp, Artificial Sequence
  Synthetic sequence
ctttcttcttgtacagttgg

SEQ ID NO: 2701 - DNA, 19 bp, Artificial Sequence
  Synthetic sequence
ctttcttcttgtacagttg

SEQ ID NO: 2702 - DNA, 19 bp, Artificial Sequence
  Synthetic sequence
ctttcttcttgtacagttg

SEQ ID NO: 2703 - DNA, 19 bp, Artificial Sequence
  Synthetic sequence
ctttcttcttgtacagttg

SEQ ID NO: 2704 - DNA, 19 bp, Artificial Sequence
  Synthetic sequence
ctttcttcttgtacagttg

SEQ ID NO: 2705 - DNA, 19 bp, Artificial Sequence
  Synthetic sequence
ctttcttcttgtacagttg

SEQ ID NO: 2706 - DNA, 19 bp, Artificial Sequence
  Synthetic sequence
tttcttcttgtacagttgg

SEQ ID NO: 2707 - DNA, 19 bp, Artificial Sequence
  Synthetic sequence
tttcttcttgtacagttgg

SEQ ID NO: 2708 - DNA, 19 bp, Artificial Sequence
  Synthetic sequence
tttcttcttgtacagttgg

SEQ ID NO: 2709 - DNA, 19 bp, Artificial Sequence
  Synthetic sequence
tttcttcttgtacagttgg

SEQ ID NO: 2710 - DNA, 19 bp, Artificial Sequence
  Synthetic sequence
tttcttcttgtacagttgg

SEQ ID NO: 2711 - DNA, 20 bp, Artificial Sequence
  Synthetic sequence
ctttcttcttgtacagttgg

SEQ ID NO: 2712 - DNA, 20 bp, Artificial Sequence
  Synthetic sequence
ctttcttcttgtacagttgg

SEQ ID NO: 2713 - DNA, 20 bp, Artificial Sequence
  Synthetic sequence
ctttcttcttgtacagttgg

SEQ ID NO: 2714 - DNA, 20 bp, Artificial Sequence
  Synthetic sequence
ctttcttcttgtacagttgg

SEQ ID NO: 2715 - DNA, 20 bp, Artificial Sequence
  Synthetic sequence
ctttcttcttgtacagttgg

SEQ ID NO: 2716 - DNA, 20 bp, Artificial Sequence
  Synthetic sequence
ctttcttcttgtacagttgg

SEQ ID NO: 2717 - DNA, 20 bp, Artificial Sequence
  Synthetic sequence
ctttcttcttgtacagttgg

SEQ ID NO: 2718 - DNA, 20 bp, Artificial Sequence
  Synthetic sequence
ctttcttcttgtacagttgg

SEQ ID NO: 2719 - DNA, 19 bp, Artificial Sequence
  Synthetic sequence
ctttcttcttgtacagttg

SEQ ID NO: 2720 - DNA, 19 bp, Artificial Sequence
  Synthetic sequence
ctttcttcttgtacagttg

SEQ ID NO: 2721 - DNA, 19 bp, Artificial Sequence
  Synthetic sequence
ctttcttcttgtacagttg

SEQ ID NO: 2722 - DNA, 19 bp, Artificial Sequence
  Synthetic sequence
ctttcttcttgtacagttg

SEQ ID NO: 2723 - DNA, 20 bp, Artificial Sequence
  Synthetic sequence
ctttcttcttgtacagttgg

SEQ ID NO: 2724 - DNA, 20 bp, Artificial Sequence
  Synthetic sequence
ctttcttcttgtacagttgg

SEQ ID NO: 2725 - DNA, 20 bp, Artificial Sequence
  Synthetic sequence
ctttcttcttgtacagttgg

SEQ ID NO: 2726 - DNA, 18 bp, Artificial Sequence
  Synthetic sequence
ctttcttcttgtacagtt

SEQ ID NO: 2727 - DNA, 18 bp, Artificial Sequence
  Synthetic sequence
ctttcttcttgtacagtt

SEQ ID NO: 2728 - DNA, 18 bp, Artificial Sequence
  Synthetic sequence
ctttcttcttgtacagtt

SEQ ID NO: 2729 - DNA, 18 bp, Artificial Sequence
  Synthetic sequence
ctttcttcttgtacagtt

SEQ ID NO: 2730 - DNA, 18 bp, Artificial Sequence
  Synthetic sequence
ttcttcttgtacagttgg

SEQ ID NO: 2731 - DNA, 18 bp, Artificial Sequence
  Synthetic sequence
ttcttcttgtacagttgg

SEQ ID NO: 2732 - DNA, 18 bp, Artificial Sequence
  Synthetic sequence
ttcttcttgtacagttgg

SEQ ID NO: 2733 - DNA, 18 bp, Artificial Sequence
  Synthetic sequence
ttcttcttgtacagttgg

SEQ ID NO: 2734 - DNA, 20 bp, Artificial Sequence
  Synthetic sequence
ctttcttcttgtacagttgg

SEQ ID NO: 2735 - DNA, 20 bp, Artificial Sequence
  Synthetic sequence
ctttcttcttgtacagttgg

SEQ ID NO: 2736 - DNA, 20 bp, Artificial Sequence
  Synthetic sequence
ctttcttcttgtacagttgg

SEQ ID NO: 2737 - DNA, 20 bp, Artificial Sequence
  Synthetic sequence
ctttcttcttgtacagttgg

SEQ ID NO: 2738 - DNA, 20 bp, Artificial Sequence
  Synthetic sequence
ctttcttcttgtacagttgg

SEQ ID NO: 2739 - DNA, 20 bp, Artificial Sequence
  Synthetic sequence
ctttcttcttgtacagttgg

SEQ ID NO: 2740 - DNA, 19 bp, Artificial Sequence
  Synthetic sequence
ctttcttcttgtacagttg

SEQ ID NO: 2741 - DNA, 19 bp, Artificial Sequence
  Synthetic sequence
ctttcttcttgtacagttg

SEQ ID NO: 2742 - DNA, 19 bp, Artificial Sequence
  Synthetic sequence
ctttcttcttgtacagttg

SEQ ID NO: 2743 - DNA, 19 bp, Artificial Sequence
  Synthetic sequence
tttcttcttgtacagttgg

SEQ ID NO: 2744 - DNA, 19 bp, Artificial Sequence
  Synthetic sequence
tttcttcttgtacagttgg

SEQ ID NO: 2745 - DNA, 19 bp, Artificial Sequence
  Synthetic sequence
tttcttcttgtacagttgg

SEQ ID NO: 2746 - DNA, 18 bp, Artificial Sequence
  Synthetic sequence
ctttcttcttgtacagtt

SEQ ID NO: 2747 - DNA, 18 bp, Artificial Sequence
  Synthetic sequence
ctttcttcttgtacagtt

SEQ ID NO: 2748 - DNA, 18 bp, Artificial Sequence
  Synthetic sequence
ctttcttcttgtacagtt

SEQ ID NO: 2749 - DNA, 18 bp, Artificial Sequence
  Synthetic sequence
ttcttcttgtacagttgg

SEQ ID NO: 2750 - DNA, 18 bp, Artificial Sequence
  Synthetic sequence
ttcttcttgtacagttgg

SEQ ID NO: 2751 - DNA, 18 bp, Artificial Sequence
  Synthetic sequence
ttcttcttgtacagttgg

SEQ ID NO: 2752 - DNA, 17 bp, Artificial Sequence
  Synthetic sequence
ctttcttcttgtacagt

SEQ ID NO: 2753 - DNA, 17 bp, Artificial Sequence
  Synthetic sequence
ctttcttcttgtacagt

SEQ ID NO: 2754 - DNA, 17 bp, Artificial Sequence
  Synthetic sequence
ctttcttcttgtacagt

SEQ ID NO: 2755 - DNA, 17 bp, Artificial Sequence
  Synthetic sequence
tcttcttgtacagttgg

SEQ ID NO: 2756 - DNA, 17 bp, Artificial Sequence
  Synthetic sequence
tcttcttgtacagttgg

SEQ ID NO: 2757 - DNA, 17 bp, Artificial Sequence
  Synthetic sequence
tcttcttgtacagttgg

SEQ ID NO: 2758 - DNA, 19 bp, Artificial Sequence
  Synthetic sequence
tttcttcttgtacagttgg

SEQ ID NO: 2759 - DNA, 19 bp, Artificial Sequence
  Synthetic sequence
tttcttcttgtacagttgg

SEQ ID NO: 2760 - DNA, 19 bp, Artificial Sequence
  Synthetic sequence
ctttcttcttgtacagttg

SEQ ID NO: 2761 - DNA, 19 bp, Artificial Sequence
  Synthetic sequence
ctttcttcttgtacagttg

SEQ ID NO: 2762 - DNA, 18 bp, Artificial Sequence
  Synthetic sequence
tttcttcttgtacagttg

SEQ ID NO: 2763 - DNA, 18 bp, Artificial Sequence
  Synthetic sequence
tttcttcttgtacagttg

SEQ ID NO: 2764 - DNA, 18 bp, Artificial Sequence
  Synthetic sequence
tttcttcttgtacagttg

SEQ ID NO: 2765 - DNA, 18 bp, Artificial Sequence
  Synthetic sequence
tttcttcttgtacagttg

SEQ ID NO: 2766 - DNA, 17 bp, Artificial Sequence
  Synthetic sequence
tttcttcttgtacagtt

SEQ ID NO: 2767 - DNA, 17 bp, Artificial Sequence
  Synthetic sequence
tttcttcttgtacagtt

SEQ ID NO: 2768 - DNA, 17 bp, Artificial Sequence
  Synthetic sequence
tttcttcttgtacagtt

SEQ ID NO: 2769 - DNA, 20 bp, Artificial Sequence
  Synthetic sequence
ctttcttcttgtacagttgg

SEQ ID NO: 2770 - DNA, 20 bp, Artificial Sequence
  Synthetic sequence
ctttcttcttgtacagttgg

SEQ ID NO: 2771 - DNA, 20 bp, Artificial Sequence
  Synthetic sequence
ctttcttcttgtacagttgg

SEQ ID NO: 2772 - DNA, 20 bp, Artificial Sequence
  Synthetic sequence
ctttcttcttgtacagttgg

SEQ ID NO: 2773 - DNA, 19 bp, Artificial Sequence
  Synthetic sequence
ctttcttcttgtacagttg

SEQ ID NO: 2774 - DNA, 19 bp, Artificial Sequence
  Synthetic sequence
tttcttcttgtacagttgg

SEQ ID NO: 2775 - DNA, 20 bp, Artificial Sequence
  Synthetic sequence
ctttcttcttgtacagttgg

SEQ ID NO: 2776 - DNA, 20 bp, Artificial Sequence
  Synthetic sequence
ctttcttcttgtacagttgg

SEQ ID NO: 2777 - DNA, 19 bp, Artificial Sequence
  Synthetic sequence
ctttcttcttgtacagttg

SEQ ID NO: 2778 - DNA, 20 bp, Artificial Sequence
  Synthetic sequence
ctttcttcttgtacagttgg

SEQ ID NO: 2779 - DNA, 18 bp, Artificial Sequence
  Synthetic sequence
ctttcttcttgtacagtt

SEQ ID NO: 2780 - DNA, 18 bp, Artificial Sequence
  Synthetic sequence
ttcttcttgtacagttgg

SEQ ID NO: 2781 - DNA, 20 bp, Artificial Sequence
  Synthetic sequence
ctttcttcttgtacagttgg

SEQ ID NO: 2782 - DNA, 19 bp, Artificial Sequence
  Synthetic sequence
ctttcttcttgtacagttg

SEQ ID NO: 2783 - DNA, 18 bp, Artificial Sequence
  Synthetic sequence
ctttcttcttgtacagtt

SEQ ID NO: 2784 - DNA, 18 bp, Artificial Sequence
  Synthetic sequence
ttcttcttgtacagttgg

SEQ ID NO: 2785 - DNA, 17 bp, Artificial Sequence
  Synthetic sequence
ctttcttcttgtacagt

SEQ ID NO: 2786 - DNA, 17 bp, Artificial Sequence
  Synthetic sequence
tcttcttgtacagttgg

SEQ ID NO: 2787 - DNA, 19 bp, Artificial Sequence
  Synthetic sequence
tttcttcttgtacagttgg

SEQ ID NO: 2788 - DNA, 18 bp, Artificial Sequence
  Synthetic sequence
tttcttcttgtacagttg

SEQ ID NO: 2789 - DNA, 17 bp, Artificial Sequence
  Synthetic sequence
tttcttcttgtacagtt

SEQ ID NO: 2790 - DNA, 20 bp, Artificial Sequence
  Synthetic sequence
ctttcttcttgtacagttgg

SEQ ID NO: 2791 - DNA, 20 bp, Artificial Sequence
  Synthetic sequence
ctttcttcttgtacagttgg

SEQ ID NO: 2792 - DNA, 20 bp, Artificial Sequence
  Synthetic sequence
ctttcttcttgtacagttgg

SEQ ID NO: 2793 - DNA, 20 bp, Artificial Sequence
  Synthetic sequence
ctttcttcttgtacagttgg

SEQ ID NO: 2794 - DNA, 20 bp, Artificial Sequence
  Synthetic sequence
ctttcttcttgtacagttgg

SEQ ID NO: 2795 - DNA, 20 bp, Artificial Sequence
  Synthetic sequence
ctttcttcttgtacagttgg

SEQ ID NO: 2796 - DNA, 20 bp, Artificial Sequence
  Synthetic sequence
ctttcttcttgtacagttgg

SEQ ID NO: 2797 - DNA, 20 bp, Artificial Sequence
  Synthetic sequence
ctttcttcttgtacagttgg

SEQ ID NO: 2798 - DNA, 20 bp, Artificial Sequence
  Synthetic sequence
ctttcttcttgtacagttgg

SEQ ID NO: 2799 - DNA, 20 bp, Artificial Sequence
  Synthetic sequence
ctttcttcttgtacagttgg

SEQ ID NO: 2800 - DNA, 20 bp, Artificial Sequence
  Synthetic sequence
ctttcttcttgtacagttgg

SEQ ID NO: 2801 - DNA, 20 bp, Artificial Sequence
  Synthetic sequence
ctttcttcttgtacagttgg

SEQ ID NO: 2802 - DNA, 20 bp, Artificial Sequence
  Synthetic sequence
ctttcttcttgtacagttgg

SEQ ID NO: 2803 - DNA, 20 bp, Artificial Sequence
  Synthetic sequence
ctttcttcttgtacagttgg

SEQ ID NO: 2804 - DNA, 20 bp, Artificial Sequence
  Synthetic sequence
ctttcttcttgtacagttgg

SEQ ID NO: 2805 - DNA, 21 bp, Artificial Sequence
  Synthetic sequence
ctttcttcttgtacagttggt

SEQ ID NO: 2806 - DNA, 21 bp, Artificial Sequence
  Synthetic sequence
ctttcttcttgtacagttggt

SEQ ID NO: 2807 - DNA, 21 bp, Artificial Sequence
  Synthetic sequence
ctttcttcttgtacagttggt

SEQ ID NO: 2808 - DNA, 21 bp, Artificial Sequence
  Synthetic sequence
ctttcttcttgtacagttggt

SEQ ID NO: 2809 - DNA, 21 bp, Artificial Sequence
  Synthetic sequence
ctttcttcttgtacagttggt

SEQ ID NO: 2810 - DNA, 21 bp, Artificial Sequence
  Synthetic sequence
ctttcttcttgtacagttggt

SEQ ID NO: 2811 - DNA, 21 bp, Artificial Sequence
  Synthetic sequence
ctttcttcttgtacagttggt

SEQ ID NO: 2812 - DNA, 21 bp, Artificial Sequence
  Synthetic sequence
ctttcttcttgtacagttggt

SEQ ID NO: 2813 - DNA, 21 bp, Artificial Sequence
  Synthetic sequence
ctttcttcttgtacagttggt

SEQ ID NO: 2814 - DNA, 21 bp, Artificial Sequence
  Synthetic sequence
ctttcttcttgtacagttggt

SEQ ID NO: 2815 - DNA, 21 bp, Artificial Sequence
  Synthetic sequence
ctttcttcttgtacagttggt

SEQ ID NO: 2816 - DNA, 21 bp, Artificial Sequence
  Synthetic sequence
ctttcttcttgtacagttggt

SEQ ID NO: 2817 - DNA, 21 bp, Artificial Sequence
  Synthetic sequence
ctttcttcttgtacagttggt

SEQ ID NO: 2818 - DNA, 21 bp, Artificial Sequence
  Synthetic sequence
ctttcttcttgtacagttggt

SEQ ID NO: 2819 - DNA, 21 bp, Artificial Sequence
  Synthetic sequence
ctttcttcttgtacagttggt

SEQ ID NO: 2820 - DNA, 21 bp, Artificial Sequence
  Synthetic sequence
ctttcttcttgtacagttggt

SEQ ID NO: 2821 - DNA, 22 bp, Artificial Sequence
  Synthetic sequence
ctttcttcttgtacagttggtc

SEQ ID NO: 2822 - DNA, 22 bp, Artificial Sequence
  Synthetic sequence
ctttcttcttgtacagttggtc

SEQ ID NO: 2823 - DNA, 22 bp, Artificial Sequence
  Synthetic sequence
ctttcttcttgtacagttggtc

SEQ ID NO: 2824 - DNA, 22 bp, Artificial Sequence
  Synthetic sequence
ctttcttcttgtacagttggtc

SEQ ID NO: 2825 - DNA, 22 bp, Artificial Sequence
  Synthetic sequence
ctttcttcttgtacagttggtc

SEQ ID NO: 2826 - DNA, 22 bp, Artificial Sequence
  Synthetic sequence
ctttcttcttgtacagttggtc

SEQ ID NO: 2827 - DNA, 22 bp, Artificial Sequence
  Synthetic sequence
ctttcttcttgtacagttggtc

SEQ ID NO: 2828 - DNA, 22 bp, Artificial Sequence
  Synthetic sequence
ctttcttcttgtacagttggtc

SEQ ID NO: 2829 - DNA, 22 bp, Artificial Sequence
  Synthetic sequence
ctttcttcttgtacagttggtc

SEQ ID NO: 2830 - DNA, 22 bp, Artificial Sequence
  Synthetic sequence
ctttcttcttgtacagttggtc

SEQ ID NO: 2831 - DNA, 22 bp, Artificial Sequence
  Synthetic sequence
ctttcttcttgtacagttggtc

SEQ ID NO: 2832 - DNA, 22 bp, Artificial Sequence
  Synthetic sequence
ctttcttcttgtacagttggtc

SEQ ID NO: 2833 - DNA, 22 bp, Artificial Sequence
  Synthetic sequence
ctttcttcttgtacagttggtc

SEQ ID NO: 2834 - DNA, 22 bp, Artificial Sequence
  Synthetic sequence
ctttcttcttgtacagttggtc

SEQ ID NO: 2835 - DNA, 22 bp, Artificial Sequence
  Synthetic sequence
ctttcttcttgtacagttggtc

SEQ ID NO: 2836 - DNA, 22 bp, Artificial Sequence
  Synthetic sequence
ctttcttcttgtacagttggtc

SEQ ID NO: 2837 - DNA, 23 bp, Artificial Sequence
  Synthetic sequence
ctttcttcttgtacagttggtct

SEQ ID NO: 2838 - DNA, 23 bp, Artificial Sequence
  Synthetic sequence
ctttcttcttgtacagttggtct

SEQ ID NO: 2839 - DNA, 23 bp, Artificial Sequence
  Synthetic sequence
ctttcttcttgtacagttggtct

SEQ ID NO: 2840 - DNA, 23 bp, Artificial Sequence
  Synthetic sequence
ctttcttcttgtacagttggtct

SEQ ID NO: 2841 - DNA, 23 bp, Artificial Sequence
  Synthetic sequence
ctttcttcttgtacagttggtct

SEQ ID NO: 2842 - DNA, 23 bp, Artificial Sequence
  Synthetic sequence
ctttcttcttgtacagttggtct

SEQ ID NO: 2843 - DNA, 23 bp, Artificial Sequence
  Synthetic sequence
ctttcttcttgtacagttggtct

SEQ ID NO: 2844 - DNA, 23 bp, Artificial Sequence
  Synthetic sequence
ctttcttcttgtacagttggtct

SEQ ID NO: 2845 - DNA, 23 bp, Artificial Sequence
  Synthetic sequence
ctttcttcttgtacagttggtct

SEQ ID NO: 2846 - DNA, 23 bp, Artificial Sequence
  Synthetic sequence
ctttcttcttgtacagttggtct

SEQ ID NO: 2847 - DNA, 23 bp, Artificial Sequence
  Synthetic sequence
ctttcttcttgtacagttggtct

SEQ ID NO: 2848 - DNA, 23 bp, Artificial Sequence
  Synthetic sequence
ctttcttcttgtacagttggtct

SEQ ID NO: 2849 - DNA, 23 bp, Artificial Sequence
  Synthetic sequence
ctttcttcttgtacagttggtct

SEQ ID NO: 2850 - DNA, 23 bp, Artificial Sequence
  Synthetic sequence
ctttcttcttgtacagttggtct

SEQ ID NO: 2851 - DNA, 23 bp, Artificial Sequence
  Synthetic sequence
ctttcttcttgtacagttggtct

SEQ ID NO: 2852 - DNA, 23 bp, Artificial Sequence
  Synthetic sequence
ctttcttcttgtacagttggtct

SEQ ID NO: 2853 - DNA, 21 bp, Artificial Sequence
  Synthetic sequence
ctttcttcttgtacagttggt

SEQ ID NO: 2854 - DNA, 21 bp, Artificial Sequence
  Synthetic sequence
ctttcttcttgtacagttggt

SEQ ID NO: 2855 - DNA, 21 bp, Artificial Sequence
  Synthetic sequence
ctttcttcttgtacagttggt

SEQ ID NO: 2856 - DNA, 21 bp, Artificial Sequence
  Synthetic sequence
ctttcttcttgtacagttggt

SEQ ID NO: 2857 - DNA, 21 bp, Artificial Sequence
  Synthetic sequence
ctttcttcttgtacagttggt

SEQ ID NO: 2858 - DNA, 21 bp, Artificial Sequence
  Synthetic sequence
ctttcttcttgtacagttggt

SEQ ID NO: 2859 - DNA, 21 bp, Artificial Sequence
  Synthetic sequence
ctttcttcttgtacagttggt

SEQ ID NO: 2860 - DNA, 21 bp, Artificial Sequence
  Synthetic sequence
ctttcttcttgtacagttggt

SEQ ID NO: 2861 - DNA, 21 bp, Artificial Sequence
  Synthetic sequence
ctttcttcttgtacagttggt

SEQ ID NO: 2862 - DNA, 21 bp, Artificial Sequence
  Synthetic sequence
ctttcttcttgtacagttggt

SEQ ID NO: 2863 - DNA, 21 bp, Artificial Sequence
  Synthetic sequence
ctttcttcttgtacagttggt

SEQ ID NO: 2864 - DNA, 21 bp, Artificial Sequence
  Synthetic sequence
ctttcttcttgtacagttggt

SEQ ID NO: 2865 - DNA, 21 bp, Artificial Sequence
  Synthetic sequence
ctttcttcttgtacagttggt

SEQ ID NO: 2866 - DNA, 21 bp, Artificial Sequence
  Synthetic sequence
ctttcttcttgtacagttggt

SEQ ID NO: 2867 - DNA, 21 bp, Artificial Sequence
  Synthetic sequence
ctttcttcttgtacagttggt

SEQ ID NO: 2868 - DNA, 21 bp, Artificial Sequence
  Synthetic sequence
ctttcttcttgtacagttggt

SEQ ID NO: 2869 - DNA, 22 bp, Artificial Sequence
  Synthetic sequence
ctttcttcttgtacagttggtc

SEQ ID NO: 2870 - DNA, 22 bp, Artificial Sequence
  Synthetic sequence
ctttcttcttgtacagttggtc

SEQ ID NO: 2871 - DNA, 22 bp, Artificial Sequence
  Synthetic sequence
ctttcttcttgtacagttggtc

SEQ ID NO: 2872 - DNA, 22 bp, Artificial Sequence
  Synthetic sequence
ctttcttcttgtacagttggtc

SEQ ID NO: 2873 - DNA, 22 bp, Artificial Sequence
  Synthetic sequence
ctttcttcttgtacagttggtc

SEQ ID NO: 2874 - DNA, 22 bp, Artificial Sequence
  Synthetic sequence
ctttcttcttgtacagttggtc

SEQ ID NO: 2875 - DNA, 22 bp, Artificial Sequence
  Synthetic sequence
ctttcttcttgtacagttggtc

SEQ ID NO: 2876 - DNA, 22 bp, Artificial Sequence
  Synthetic sequence
ctttcttcttgtacagttggtc

SEQ ID NO: 2877 - DNA, 22 bp, Artificial Sequence
  Synthetic sequence
ctttcttcttgtacagttggtc

SEQ ID NO: 2878 - DNA, 22 bp, Artificial Sequence
  Synthetic sequence
ctttcttcttgtacagttggtc

SEQ ID NO: 2879 - DNA, 22 bp, Artificial Sequence
  Synthetic sequence
ctttcttcttgtacagttggtc

SEQ ID NO: 2880 - DNA, 22 bp, Artificial Sequence
  Synthetic sequence
ctttcttcttgtacagttggtc

SEQ ID NO: 2881 - DNA, 22 bp, Artificial Sequence
  Synthetic sequence
ctttcttcttgtacagttggtc

SEQ ID NO: 2882 - DNA, 22 bp, Artificial Sequence
  Synthetic sequence
ctttcttcttgtacagttggtc

SEQ ID NO: 2883 - DNA, 22 bp, Artificial Sequence
  Synthetic sequence
ctttcttcttgtacagttggtc

SEQ ID NO: 2884 - DNA, 22 bp, Artificial Sequence
  Synthetic sequence
ctttcttcttgtacagttggtc

SEQ ID NO: 2885 - DNA, 20 bp, Artificial Sequence
  Synthetic sequence
tgatcctgttctcccagcaa

SEQ ID NO: 2886 - DNA, 20 bp, Artificial Sequence
  Synthetic sequence
tgatcctgttctcccagcaa

SEQ ID NO: 2887 - DNA, 20 bp, Artificial Sequence
  Synthetic sequence
tgatcctgttctcccagcaa

SEQ ID NO: 2888 - DNA, 20 bp, Artificial Sequence
  Synthetic sequence
tgatcctgttctcccagcaa

SEQ ID NO: 2889 - DNA, 20 bp, Artificial Sequence
  Synthetic sequence
tgatcctgttctcccagcaa

SEQ ID NO: 2890 - DNA, 20 bp, Artificial Sequence
  Synthetic sequence
tgatcctgttctcccagcaa

SEQ ID NO: 2891 - DNA, 20 bp, Artificial Sequence
  Synthetic sequence
tgatcctgttctcccagcaa

SEQ ID NO: 2892 - DNA, 20 bp, Artificial Sequence
  Synthetic sequence
tgatcctgttctcccagcaa

SEQ ID NO: 2893 - DNA, 20 bp, Artificial Sequence
  Synthetic sequence
tgatcctgttctcccagcaa

SEQ ID NO: 2894 - DNA, 20 bp, Artificial Sequence
  Synthetic sequence
tgatcctgttctcccagcaa

SEQ ID NO: 2895 - DNA, 20 bp, Artificial Sequence
  Synthetic sequence
tgatcctgttctcccagcaa

SEQ ID NO: 2896 - DNA, 20 bp, Artificial Sequence
  Synthetic sequence
tgatcctgttctcccagcaa

SEQ ID NO: 2897 - DNA, 20 bp, Artificial Sequence
  Synthetic sequence
tgatcctgttctcccagcaa

SEQ ID NO: 2898 - DNA, 20 bp, Artificial Sequence
  Synthetic sequence
tgatcctgttctcccagcaa

SEQ ID NO: 2899 - DNA, 20 bp, Artificial Sequence
  Synthetic sequence
tgatcctgttctcccagcaa

SEQ ID NO: 2900 - DNA, 20 bp, Artificial Sequence
  Synthetic sequence
tgatcctgttctcccagcaa

SEQ ID NO: 2901 - DNA, 20 bp, Artificial Sequence
  Synthetic sequence
tgatcctgttctcccagcaa

SEQ ID NO: 2902 - DNA, 20 bp, Artificial Sequence
  Synthetic sequence
tgatcctgttctcccagcaa

SEQ ID NO: 2903 - DNA, 20 bp, Artificial Sequence
  Synthetic sequence
tgatcctgttctcccagcaa

SEQ ID NO: 2904 - DNA, 20 bp, Artificial Sequence
  Synthetic sequence
tgatcctgttctcccagcaa

SEQ ID NO: 2905 - DNA, 20 bp, Artificial Sequence
  Synthetic sequence
tgatcctgttctcccagcaa

SEQ ID NO: 2906 - DNA, 20 bp, Artificial Sequence
  Synthetic sequence
tgatcctgttctcccagcaa

SEQ ID NO: 2907 - DNA, 19 bp, Artificial Sequence
  Synthetic sequence
tgatcctgttctcccagca

SEQ ID NO: 2908 - DNA, 19 bp, Artificial Sequence
  Synthetic sequence
tgatcctgttctcccagca

SEQ ID NO: 2909 - DNA, 19 bp, Artificial Sequence
  Synthetic sequence
tgatcctgttctcccagca

SEQ ID NO: 2910 - DNA, 19 bp, Artificial Sequence
  Synthetic sequence
tgatcctgttctcccagca

SEQ ID NO: 2911 - DNA, 19 bp, Artificial Sequence
  Synthetic sequence
tgatcctgttctcccagca

SEQ ID NO: 2912 - DNA, 19 bp, Artificial Sequence
  Synthetic sequence
gatcctgttctcccagcaa

SEQ ID NO: 2913 - DNA, 19 bp, Artificial Sequence
  Synthetic sequence
gatcctgttctcccagcaa

SEQ ID NO: 2914 - DNA, 19 bp, Artificial Sequence
  Synthetic sequence
gatcctgttctcccagcaa

SEQ ID NO: 2915 - DNA, 19 bp, Artificial Sequence
  Synthetic sequence
gatcctgttctcccagcaa

SEQ ID NO: 2916 - DNA, 19 bp, Artificial Sequence
  Synthetic sequence
gatcctgttctcccagcaa

SEQ ID NO: 2917 - DNA, 20 bp, Artificial Sequence
  Synthetic sequence
tgatcctgttctcccagcaa

SEQ ID NO: 2918 - DNA, 20 bp, Artificial Sequence
  Synthetic sequence
tgatcctgttctcccagcaa

SEQ ID NO: 2919 - DNA, 20 bp, Artificial Sequence
  Synthetic sequence
tgatcctgttctcccagcaa

SEQ ID NO: 2920 - DNA, 20 bp, Artificial Sequence
  Synthetic sequence
tgatcctgttctcccagcaa

SEQ ID NO: 2921 - DNA, 20 bp, Artificial Sequence
  Synthetic sequence
tgatcctgttctcccagcaa

SEQ ID NO: 2922 - DNA, 20 bp, Artificial Sequence
  Synthetic sequence
tgatcctgttctcccagcaa

SEQ ID NO: 2923 - DNA, 20 bp, Artificial Sequence
  Synthetic sequence
tgatcctgttctcccagcaa

SEQ ID NO: 2924 - DNA, 20 bp, Artificial Sequence
  Synthetic sequence
tgatcctgttctcccagcaa

SEQ ID NO: 2925 - DNA, 19 bp, Artificial Sequence
  Synthetic sequence
tgatcctgttctcccagca

SEQ ID NO: 2926 - DNA, 19 bp, Artificial Sequence
  Synthetic sequence
tgatcctgttctcccagca

SEQ ID NO: 2927 - DNA, 19 bp, Artificial Sequence
  Synthetic sequence
tgatcctgttctcccagca

SEQ ID NO: 2928 - DNA, 19 bp, Artificial Sequence
  Synthetic sequence
tgatcctgttctcccagca

SEQ ID NO: 2929 - DNA, 20 bp, Artificial Sequence
  Synthetic sequence
tgatcctgttctcccagcaa

SEQ ID NO: 2930 - DNA, 20 bp, Artificial Sequence
  Synthetic sequence
tgatcctgttctcccagcaa

SEQ ID NO: 2931 - DNA, 20 bp, Artificial Sequence
  Synthetic sequence
tgatcctgttctcccagcaa

SEQ ID NO: 2932 - DNA, 18 bp, Artificial Sequence
  Synthetic sequence
tgatcctgttctcccagc

SEQ ID NO: 2933 - DNA, 18 bp, Artificial Sequence
  Synthetic sequence
tgatcctgttctcccagc

SEQ ID NO: 2934 - DNA, 18 bp, Artificial Sequence
  Synthetic sequence
tgatcctgttctcccagc

SEQ ID NO: 2935 - DNA, 18 bp, Artificial Sequence
  Synthetic sequence
tgatcctgttctcccagc

SEQ ID NO: 2936 - DNA, 18 bp, Artificial Sequence
  Synthetic sequence
atcctgttctcccagcaa

SEQ ID NO: 2937 - DNA, 18 bp, Artificial Sequence
  Synthetic sequence
atcctgttctcccagcaa

SEQ ID NO: 2938 - DNA, 18 bp, Artificial Sequence
  Synthetic sequence
atcctgttctcccagcaa

SEQ ID NO: 2939 - DNA, 18 bp, Artificial Sequence
  Synthetic sequence
atcctgttctcccagcaa

SEQ ID NO: 2940 - DNA, 20 bp, Artificial Sequence
  Synthetic sequence
tgatcctgttctcccagcaa

SEQ ID NO: 2941 - DNA, 20 bp, Artificial Sequence
  Synthetic sequence
tgatcctgttctcccagcaa

SEQ ID NO: 2942 - DNA, 20 bp, Artificial Sequence
  Synthetic sequence
tgatcctgttctcccagcaa

SEQ ID NO: 2943 - DNA, 20 bp, Artificial Sequence
  Synthetic sequence
tgatcctgttctcccagcaa

SEQ ID NO: 2944 - DNA, 20 bp, Artificial Sequence
  Synthetic sequence
tgatcctgttctcccagcaa

SEQ ID NO: 2945 - DNA, 20 bp, Artificial Sequence
  Synthetic sequence
tgatcctgttctcccagcaa

SEQ ID NO: 2946 - DNA, 19 bp, Artificial Sequence
  Synthetic sequence
tgatcctgttctcccagca

SEQ ID NO: 2947 - DNA, 19 bp, Artificial Sequence
  Synthetic sequence
tgatcctgttctcccagca

SEQ ID NO: 2948 - DNA, 19 bp, Artificial Sequence
  Synthetic sequence
tgatcctgttctcccagca

SEQ ID NO: 2949 - DNA, 19 bp, Artificial Sequence
  Synthetic sequence
gatcctgttctcccagcaa

SEQ ID NO: 2950 - DNA, 19 bp, Artificial Sequence
  Synthetic sequence
gatcctgttctcccagcaa

SEQ ID NO: 2951 - DNA, 19 bp, Artificial Sequence
  Synthetic sequence
gatcctgttctcccagcaa

SEQ ID NO: 2952 - DNA, 18 bp, Artificial Sequence
  Synthetic sequence
tgatcctgttctcccagc

SEQ ID NO: 2953 - DNA, 18 bp, Artificial Sequence
  Synthetic sequence
tgatcctgttctcccagc

SEQ ID NO: 2954 - DNA, 18 bp, Artificial Sequence
  Synthetic sequence
tgatcctgttctcccagc

SEQ ID NO: 2955 - DNA, 18 bp, Artificial Sequence
  Synthetic sequence
atcctgttctcccagcaa

SEQ ID NO: 2956 - DNA, 18 bp, Artificial Sequence
  Synthetic sequence
atcctgttctcccagcaa

SEQ ID NO: 2957 - DNA, 18 bp, Artificial Sequence
  Synthetic sequence
atcctgttctcccagcaa

SEQ ID NO: 2958 - DNA, 17 bp, Artificial Sequence
  Synthetic sequence
tgatcctgttctcccag

SEQ ID NO: 2959 - DNA, 17 bp, Artificial Sequence
  Synthetic sequence
tgatcctgttctcccag

SEQ ID NO: 2960 - DNA, 17 bp, Artificial Sequence
  Synthetic sequence
tgatcctgttctcccag

SEQ ID NO: 2961 - DNA, 17 bp, Artificial Sequence
  Synthetic sequence
tcctgttctcccagcaa

SEQ ID NO: 2962 - DNA, 17 bp, Artificial Sequence
  Synthetic sequence
tcctgttctcccagcaa

SEQ ID NO: 2963 - DNA, 17 bp, Artificial Sequence
  Synthetic sequence
tcctgttctcccagcaa

SEQ ID NO: 2964 - DNA, 19 bp, Artificial Sequence
  Synthetic sequence
gatcctgttctcccagcaa

SEQ ID NO: 2965 - DNA, 19 bp, Artificial Sequence
  Synthetic sequence
gatcctgttctcccagcaa

SEQ ID NO: 2966 - DNA, 19 bp, Artificial Sequence
  Synthetic sequence
tgatcctgttctcccagca

SEQ ID NO: 2967 - DNA, 19 bp, Artificial Sequence
  Synthetic sequence
tgatcctgttctcccagca

SEQ ID NO: 2968 - DNA, 18 bp, Artificial Sequence
  Synthetic sequence
gatcctgttctcccagca

SEQ ID NO: 2969 - DNA, 18 bp, Artificial Sequence
  Synthetic sequence
gatcctgttctcccagca

SEQ ID NO: 2970 - DNA, 18 bp, Artificial Sequence
  Synthetic sequence
gatcctgttctcccagca

SEQ ID NO: 2971 - DNA, 18 bp, Artificial Sequence
  Synthetic sequence
gatcctgttctcccagca

SEQ ID NO: 2972 - DNA, 17 bp, Artificial Sequence
  Synthetic sequence
gatcctgttctcccagc

SEQ ID NO: 2973 - DNA, 17 bp, Artificial Sequence
  Synthetic sequence
gatcctgttctcccagc

SEQ ID NO: 2974 - DNA, 17 bp, Artificial Sequence
  Synthetic sequence
gatcctgttctcccagc

SEQ ID NO: 2975 - DNA, 20 bp, Artificial Sequence
  Synthetic sequence
tgatcctgttctcccagcaa

SEQ ID NO: 2976 - DNA, 20 bp, Artificial Sequence
  Synthetic sequence
tgatcctgttctcccagcaa

SEQ ID NO: 2977 - DNA, 20 bp, Artificial Sequence
  Synthetic sequence
tgatcctgttctcccagcaa

SEQ ID NO: 2978 - DNA, 20 bp, Artificial Sequence
  Synthetic sequence
tgatcctgttctcccagcaa

SEQ ID NO: 2979 - DNA, 19 bp, Artificial Sequence
  Synthetic sequence
tgatcctgttctcccagca

SEQ ID NO: 2980 - DNA, 19 bp, Artificial Sequence
  Synthetic sequence
gatcctgttctcccagcaa

SEQ ID NO: 2981 - DNA, 20 bp, Artificial Sequence
  Synthetic sequence
tgatcctgttctcccagcaa

SEQ ID NO: 2982 - DNA, 20 bp, Artificial Sequence
  Synthetic sequence
tgatcctgttctcccagcaa

SEQ ID NO: 2983 - DNA, 19 bp, Artificial Sequence
  Synthetic sequence
tgatcctgttctcccagca

SEQ ID NO: 2984 - DNA, 20 bp, Artificial Sequence
  Synthetic sequence
tgatcctgttctcccagcaa

SEQ ID NO: 2985 - DNA, 18 bp, Artificial Sequence
  Synthetic sequence
tgatcctgttctcccagc

SEQ ID NO: 2986 - DNA, 18 bp, Artificial Sequence
  Synthetic sequence
atcctgttctcccagcaa

SEQ ID NO: 2987 - DNA, 20 bp, Artificial Sequence
  Synthetic sequence
tgatcctgttctcccagcaa

SEQ ID NO: 2988 - DNA, 19 bp, Artificial Sequence
  Synthetic sequence
tgatcctgttctcccagca

SEQ ID NO: 2989 - DNA, 18 bp, Artificial Sequence
  Synthetic sequence
tgatcctgttctcccagc

SEQ ID NO: 2990 - DNA, 18 bp, Artificial Sequence
  Synthetic sequence
atcctgttctcccagcaa

SEQ ID NO: 2991 - DNA, 17 bp, Artificial Sequence
  Synthetic sequence
tgatcctgttctcccag

SEQ ID NO: 2992 - DNA, 17 bp, Artificial Sequence
  Synthetic sequence
tcctgttctcccagcaa

SEQ ID NO: 2993 - DNA, 19 bp, Artificial Sequence
  Synthetic sequence
gatcctgttctcccagcaa

SEQ ID NO: 2994 - DNA, 18 bp, Artificial Sequence
  Synthetic sequence
gatcctgttctcccagca

SEQ ID NO: 2995 - DNA, 17 bp, Artificial Sequence
  Synthetic sequence
gatcctgttctcccagc

SEQ ID NO: 2996 - DNA, 20 bp, Artificial Sequence
  Synthetic sequence
tgatcctgttctcccagcaa

SEQ ID NO: 2997 - DNA, 20 bp, Artificial Sequence
  Synthetic sequence
tgatcctgttctcccagcaa

SEQ ID NO: 2998 - DNA, 20 bp, Artificial Sequence
  Synthetic sequence
tgatcctgttctcccagcaa

SEQ ID NO: 2999 - DNA, 20 bp, Artificial Sequence
  Synthetic sequence
tgatcctgttctcccagcaa

SEQ ID NO: 3000 - DNA, 20 bp, Artificial Sequence
  Synthetic sequence
tgatcctgttctcccagcaa

SEQ ID NO: 3001 - DNA, 20 bp, Artificial Sequence
  Synthetic sequence
tgatcctgttctcccagcaa

SEQ ID NO: 3002 - DNA, 20 bp, Artificial Sequence
  Synthetic sequence
tgatcctgttctcccagcaa

SEQ ID NO: 3003 - DNA, 20 bp, Artificial Sequence
  Synthetic sequence
tgatcctgttctcccagcaa

SEQ ID NO: 3004 - DNA, 20 bp, Artificial Sequence
  Synthetic sequence
tgatcctgttctcccagcaa

SEQ ID NO: 3005 - DNA, 20 bp, Artificial Sequence
  Synthetic sequence
tgatcctgttctcccagcaa

SEQ ID NO: 3006 - DNA, 20 bp, Artificial Sequence
  Synthetic sequence
tgatcctgttctcccagcaa

SEQ ID NO: 3007 - DNA, 20 bp, Artificial Sequence
  Synthetic sequence
tgatcctgttctcccagcaa

SEQ ID NO: 3008 - DNA, 20 bp, Artificial Sequence
  Synthetic sequence
tgatcctgttctcccagcaa

SEQ ID NO: 3009 - DNA, 20 bp, Artificial Sequence
  Synthetic sequence
tgatcctgttctcccagcaa

SEQ ID NO: 3010 - DNA, 20 bp, Artificial Sequence
  Synthetic sequence
tgatcctgttctcccagcaa

SEQ ID NO: 3011 - DNA, 21 bp, Artificial Sequence
  Synthetic sequence
tgatcctgttctcccagcaac

SEQ ID NO: 3012 - DNA, 21 bp, Artificial Sequence
  Synthetic sequence
tgatcctgttctcccagcaac

SEQ ID NO: 3013 - DNA, 21 bp, Artificial Sequence
  Synthetic sequence
tgatcctgttctcccagcaac

SEQ ID NO: 3014 - DNA, 21 bp, Artificial Sequence
  Synthetic sequence
tgatcctgttctcccagcaac

SEQ ID NO: 3015 - DNA, 21 bp, Artificial Sequence
  Synthetic sequence
tgatcctgttctcccagcaac

SEQ ID NO: 3016 - DNA, 21 bp, Artificial Sequence
  Synthetic sequence
tgatcctgttctcccagcaac

SEQ ID NO: 3017 - DNA, 21 bp, Artificial Sequence
  Synthetic sequence
tgatcctgttctcccagcaac

SEQ ID NO: 3018 - DNA, 21 bp, Artificial Sequence
  Synthetic sequence
tgatcctgttctcccagcaac

SEQ ID NO: 3019 - DNA, 21 bp, Artificial Sequence
  Synthetic sequence
tgatcctgttctcccagcaac

SEQ ID NO: 3020 - DNA, 21 bp, Artificial Sequence
  Synthetic sequence
tgatcctgttctcccagcaac

SEQ ID NO: 3021 - DNA, 21 bp, Artificial Sequence
  Synthetic sequence
tgatcctgttctcccagcaac

SEQ ID NO: 3022 - DNA, 21 bp, Artificial Sequence
  Synthetic sequence
tgatcctgttctcccagcaac

SEQ ID NO: 3023 - DNA, 21 bp, Artificial Sequence
  Synthetic sequence
tgatcctgttctcccagcaac

SEQ ID NO: 3024 - DNA, 21 bp, Artificial Sequence
  Synthetic sequence
tgatcctgttctcccagcaac

SEQ ID NO: 3025 - DNA, 21 bp, Artificial Sequence
  Synthetic sequence
tgatcctgttctcccagcaac

SEQ ID NO: 3026 - DNA, 21 bp, Artificial Sequence
  Synthetic sequence
tgatcctgttctcccagcaac

SEQ ID NO: 3027 - DNA, 22 bp, Artificial Sequence
  Synthetic sequence
tgatcctgttctcccagcaaca

SEQ ID NO: 3028 - DNA, 22 bp, Artificial Sequence
  Synthetic sequence
tgatcctgttctcccagcaaca

SEQ ID NO: 3029 - DNA, 22 bp, Artificial Sequence
  Synthetic sequence
tgatcctgttctcccagcaaca

SEQ ID NO: 3030 - DNA, 22 bp, Artificial Sequence
  Synthetic sequence
tgatcctgttctcccagcaaca

SEQ ID NO: 3031 - DNA, 22 bp, Artificial Sequence
  Synthetic sequence
tgatcctgttctcccagcaaca

SEQ ID NO: 3032 - DNA, 22 bp, Artificial Sequence
  Synthetic sequence
tgatcctgttctcccagcaaca

SEQ ID NO: 3033 - DNA, 22 bp, Artificial Sequence
  Synthetic sequence
tgatcctgttctcccagcaaca

SEQ ID NO: 3034 - DNA, 22 bp, Artificial Sequence
  Synthetic sequence
tgatcctgttctcccagcaaca

SEQ ID NO: 3035 - DNA, 22 bp, Artificial Sequence
  Synthetic sequence
tgatcctgttctcccagcaaca

SEQ ID NO: 3036 - DNA, 22 bp, Artificial Sequence
  Synthetic sequence
tgatcctgttctcccagcaaca

SEQ ID NO: 3037 - DNA, 22 bp, Artificial Sequence
  Synthetic sequence
tgatcctgttctcccagcaaca

SEQ ID NO: 3038 - DNA, 22 bp, Artificial Sequence
  Synthetic sequence
tgatcctgttctcccagcaaca

SEQ ID NO: 3039 - DNA, 22 bp, Artificial Sequence
  Synthetic sequence
tgatcctgttctcccagcaaca

SEQ ID NO: 3040 - DNA, 22 bp, Artificial Sequence
  Synthetic sequence
tgatcctgttctcccagcaaca

SEQ ID NO: 3041 - DNA, 22 bp, Artificial Sequence
  Synthetic sequence
tgatcctgttctcccagcaaca

SEQ ID NO: 3042 - DNA, 22 bp, Artificial Sequence
  Synthetic sequence
tgatcctgttctcccagcaaca

SEQ ID NO: 3043 - DNA, 23 bp, Artificial Sequence
  Synthetic sequence
tgatcctgttctcccagcaacac

SEQ ID NO: 3044 - DNA, 23 bp, Artificial Sequence
  Synthetic sequence
tgatcctgttctcccagcaacac

SEQ ID NO: 3045 - DNA, 23 bp, Artificial Sequence
  Synthetic sequence
tgatcctgttctcccagcaacac

SEQ ID NO: 3046 - DNA, 23 bp, Artificial Sequence
  Synthetic sequence
tgatcctgttctcccagcaacac

SEQ ID NO: 3047 - DNA, 23 bp, Artificial Sequence
  Synthetic sequence
tgatcctgttctcccagcaacac

SEQ ID NO: 3048 - DNA, 23 bp, Artificial Sequence
  Synthetic sequence
tgatcctgttctcccagcaacac

SEQ ID NO: 3049 - DNA, 23 bp, Artificial Sequence
  Synthetic sequence
tgatcctgttctcccagcaacac

SEQ ID NO: 3050 - DNA, 23 bp, Artificial Sequence
  Synthetic sequence
tgatcctgttctcccagcaacac

SEQ ID NO: 3051 - DNA, 23 bp, Artificial Sequence
  Synthetic sequence
tgatcctgttctcccagcaacac

SEQ ID NO: 3052 - DNA, 23 bp, Artificial Sequence
  Synthetic sequence
tgatcctgttctcccagcaacac

SEQ ID NO: 3053 - DNA, 23 bp, Artificial Sequence
  Synthetic sequence
tgatcctgttctcccagcaacac

SEQ ID NO: 3054 - DNA, 23 bp, Artificial Sequence
  Synthetic sequence
tgatcctgttctcccagcaacac

SEQ ID NO: 3055 - DNA, 23 bp, Artificial Sequence
  Synthetic sequence
tgatcctgttctcccagcaacac

SEQ ID NO: 3056 - DNA, 23 bp, Artificial Sequence
  Synthetic sequence
tgatcctgttctcccagcaacac

SEQ ID NO: 3057 - DNA, 23 bp, Artificial Sequence
  Synthetic sequence
tgatcctgttctcccagcaacac

SEQ ID NO: 3058 - DNA, 23 bp, Artificial Sequence
  Synthetic sequence
tgatcctgttctcccagcaacac

SEQ ID NO: 3059 - DNA, 21 bp, Artificial Sequence
  Synthetic sequence
tgatcctgttctcccagcaac

SEQ ID NO: 3060 - DNA, 21 bp, Artificial Sequence
  Synthetic sequence
tgatcctgttctcccagcaac

SEQ ID NO: 3061 - DNA, 21 bp, Artificial Sequence
  Synthetic sequence
tgatcctgttctcccagcaac

SEQ ID NO: 3062 - DNA, 21 bp, Artificial Sequence
  Synthetic sequence
tgatcctgttctcccagcaac

SEQ ID NO: 3063 - DNA, 21 bp, Artificial Sequence
  Synthetic sequence
tgatcctgttctcccagcaac

SEQ ID NO: 3064 - DNA, 21 bp, Artificial Sequence
  Synthetic sequence
tgatcctgttctcccagcaac

SEQ ID NO: 3065 - DNA, 21 bp, Artificial Sequence
  Synthetic sequence
tgatcctgttctcccagcaac

SEQ ID NO: 3066 - DNA, 21 bp, Artificial Sequence
  Synthetic sequence
tgatcctgttctcccagcaac

SEQ ID NO: 3067 - DNA, 21 bp, Artificial Sequence
  Synthetic sequence
tgatcctgttctcccagcaac

SEQ ID NO: 3068 - DNA, 21 bp, Artificial Sequence
  Synthetic sequence
tgatcctgttctcccagcaac

SEQ ID NO: 3069 - DNA, 21 bp, Artificial Sequence
  Synthetic sequence
tgatcctgttctcccagcaac

SEQ ID NO: 3070 - DNA, 21 bp, Artificial Sequence
  Synthetic sequence
tgatcctgttctcccagcaac

SEQ ID NO: 3071 - DNA, 21 bp, Artificial Sequence
  Synthetic sequence
tgatcctgttctcccagcaac

SEQ ID NO: 3072 - DNA, 21 bp, Artificial Sequence
  Synthetic sequence
tgatcctgttctcccagcaac

SEQ ID NO: 3073 - DNA, 21 bp, Artificial Sequence
  Synthetic sequence
tgatcctgttctcccagcaac

SEQ ID NO: 3074 - DNA, 21 bp, Artificial Sequence
  Synthetic sequence
tgatcctgttctcccagcaac

SEQ ID NO: 3075 - DNA, 22 bp, Artificial Sequence
  Synthetic sequence
tgatcctgttctcccagcaaca

SEQ ID NO: 3076 - DNA, 22 bp, Artificial Sequence
  Synthetic sequence
tgatcctgttctcccagcaaca

SEQ ID NO: 3077 - DNA, 22 bp, Artificial Sequence
  Synthetic sequence
tgatcctgttctcccagcaaca

SEQ ID NO: 3078 - DNA, 22 bp, Artificial Sequence
  Synthetic sequence
tgatcctgttctcccagcaaca

SEQ ID NO: 3079 - DNA, 22 bp, Artificial Sequence
  Synthetic sequence
tgatcctgttctcccagcaaca

SEQ ID NO: 3080 - DNA, 22 bp, Artificial Sequence
  Synthetic sequence
tgatcctgttctcccagcaaca

SEQ ID NO: 3081 - DNA, 22 bp, Artificial Sequence
  Synthetic sequence
tgatcctgttctcccagcaaca

SEQ ID NO: 3082 - DNA, 22 bp, Artificial Sequence
  Synthetic sequence
tgatcctgttctcccagcaaca

SEQ ID NO: 3083 - DNA, 22 bp, Artificial Sequence
  Synthetic sequence
tgatcctgttctcccagcaaca

SEQ ID NO: 3084 - DNA, 22 bp, Artificial Sequence
  Synthetic sequence
tgatcctgttctcccagcaaca

SEQ ID NO: 3085 - DNA, 22 bp, Artificial Sequence
  Synthetic sequence
tgatcctgttctcccagcaaca

SEQ ID NO: 3086 - DNA, 22 bp, Artificial Sequence
  Synthetic sequence
tgatcctgttctcccagcaaca

SEQ ID NO: 3087 - DNA, 22 bp, Artificial Sequence
  Synthetic sequence
tgatcctgttctcccagcaaca

SEQ ID NO: 3088 - DNA, 22 bp, Artificial Sequence
  Synthetic sequence
tgatcctgttctcccagcaaca

SEQ ID NO: 3089 - DNA, 22 bp, Artificial Sequence
  Synthetic sequence
tgatcctgttctcccagcaaca

SEQ ID NO: 3090 - DNA, 22 bp, Artificial Sequence
  Synthetic sequence
tgatcctgttctcccagcaaca

SEQ ID NO: 3091 - DNA, 20 bp, Artificial Sequence
  Synthetic sequence
gagctctttccacccatgtt

SEQ ID NO: 3092 - DNA, 20 bp, Artificial Sequence
  Synthetic sequence
gagctctttccacccatgtt

SEQ ID NO: 3093 - DNA, 20 bp, Artificial Sequence
  Synthetic sequence
gagctctttccacccatgtt

SEQ ID NO: 3094 - DNA, 20 bp, Artificial Sequence
  Synthetic sequence
gagctctttccacccatgtt

SEQ ID NO: 3095 - DNA, 20 bp, Artificial Sequence
  Synthetic sequence
gagctctttccacccatgtt

SEQ ID NO: 3096 - DNA, 20 bp, Artificial Sequence
  Synthetic sequence
gagctctttccacccatgtt

SEQ ID NO: 3097 - DNA, 20 bp, Artificial Sequence
  Synthetic sequence
gagctctttccacccatgtt

SEQ ID NO: 3098 - DNA, 20 bp, Artificial Sequence
  Synthetic sequence
gagctctttccacccatgtt

SEQ ID NO: 3099 - DNA, 20 bp, Artificial Sequence
  Synthetic sequence
gagctctttccacccatgtt

SEQ ID NO: 3100 - DNA, 20 bp, Artificial Sequence
  Synthetic sequence
gagctctttccacccatgtt

SEQ ID NO: 3101 - DNA, 20 bp, Artificial Sequence
  Synthetic sequence
gagctctttccacccatgtt

SEQ ID NO: 3102 - DNA, 20 bp, Artificial Sequence
  Synthetic sequence
gagctctttccacccatgtt

SEQ ID NO: 3103 - DNA, 20 bp, Artificial Sequence
  Synthetic sequence
gagctctttccacccatgtt

SEQ ID NO: 3104 - DNA, 20 bp, Artificial Sequence
  Synthetic sequence
gagctctttccacccatgtt

SEQ ID NO: 3105 - DNA, 20 bp, Artificial Sequence
  Synthetic sequence
gagctctttccacccatgtt

SEQ ID NO: 3106 - DNA, 20 bp, Artificial Sequence
  Synthetic sequence
gagctctttccacccatgtt

SEQ ID NO: 3107 - DNA, 20 bp, Artificial Sequence
  Synthetic sequence
gagctctttccacccatgtt

SEQ ID NO: 3108 - DNA, 20 bp, Artificial Sequence
  Synthetic sequence
gagctctttccacccatgtt

SEQ ID NO: 3109 - DNA, 20 bp, Artificial Sequence
  Synthetic sequence
gagctctttccacccatgtt

SEQ ID NO: 3110 - DNA, 20 bp, Artificial Sequence
  Synthetic sequence
gagctctttccacccatgtt

SEQ ID NO: 3111 - DNA, 20 bp, Artificial Sequence
  Synthetic sequence
gagctctttccacccatgtt

SEQ ID NO: 3112 - DNA, 20 bp, Artificial Sequence
  Synthetic sequence
gagctctttccacccatgtt

SEQ ID NO: 3113 - DNA, 19 bp, Artificial Sequence
  Synthetic sequence
gagctctttccacccatgt

SEQ ID NO: 3114 - DNA, 19 bp, Artificial Sequence
  Synthetic sequence
gagctctttccacccatgt

SEQ ID NO: 3115 - DNA, 19 bp, Artificial Sequence
  Synthetic sequence
gagctctttccacccatgt

SEQ ID NO: 3116 - DNA, 19 bp, Artificial Sequence
  Synthetic sequence
gagctctttccacccatgt

SEQ ID NO: 3117 - DNA, 19 bp, Artificial Sequence
  Synthetic sequence
gagctctttccacccatgt

SEQ ID NO: 3118 - DNA, 19 bp, Artificial Sequence
  Synthetic sequence
agctctttccacccatgtt

SEQ ID NO: 3119 - DNA, 19 bp, Artificial Sequence
  Synthetic sequence
agctctttccacccatgtt

SEQ ID NO: 3120 - DNA, 19 bp, Artificial Sequence
  Synthetic sequence
agctctttccacccatgtt

SEQ ID NO: 3121 - DNA, 19 bp, Artificial Sequence
  Synthetic sequence
agctctttccacccatgtt

SEQ ID NO: 3122 - DNA, 19 bp, Artificial Sequence
  Synthetic sequence
agctctttccacccatgtt

SEQ ID NO: 3123 - DNA, 20 bp, Artificial Sequence
  Synthetic sequence
gagctctttccacccatgtt

SEQ ID NO: 3124 - DNA, 20 bp, Artificial Sequence
  Synthetic sequence
gagctctttccacccatgtt

SEQ ID NO: 3125 - DNA, 20 bp, Artificial Sequence
  Synthetic sequence
gagctctttccacccatgtt

SEQ ID NO: 3126 - DNA, 20 bp, Artificial Sequence
  Synthetic sequence
gagctctttccacccatgtt

SEQ ID NO: 3127 - DNA, 20 bp, Artificial Sequence
  Synthetic sequence
gagctctttccacccatgtt

SEQ ID NO: 3128 - DNA, 20 bp, Artificial Sequence
  Synthetic sequence
gagctctttccacccatgtt

SEQ ID NO: 3129 - DNA, 20 bp, Artificial Sequence
  Synthetic sequence
gagctctttccacccatgtt

SEQ ID NO: 3130 - DNA, 20 bp, Artificial Sequence
  Synthetic sequence
gagctctttccacccatgtt

SEQ ID NO: 3131 - DNA, 19 bp, Artificial Sequence
  Synthetic sequence
gagctctttccacccatgt

SEQ ID NO: 3132 - DNA, 19 bp, Artificial Sequence
  Synthetic sequence
gagctctttccacccatgt

SEQ ID NO: 3133 - DNA, 19 bp, Artificial Sequence
  Synthetic sequence
gagctctttccacccatgt

SEQ ID NO: 3134 - DNA, 19 bp, Artificial Sequence
  Synthetic sequence
gagctctttccacccatgt

SEQ ID NO: 3135 - DNA, 20 bp, Artificial Sequence
  Synthetic sequence
gagctctttccacccatgtt

SEQ ID NO: 3136 - DNA, 20 bp, Artificial Sequence
  Synthetic sequence
gagctctttccacccatgtt

SEQ ID NO: 3137 - DNA, 20 bp, Artificial Sequence
  Synthetic sequence
gagctctttccacccatgtt

SEQ ID NO: 3138 - DNA, 18 bp, Artificial Sequence
  Synthetic sequence
gagctctttccacccatg

SEQ ID NO: 3139 - DNA, 18 bp, Artificial Sequence
  Synthetic sequence
gagctctttccacccatg

SEQ ID NO: 3140 - DNA, 18 bp, Artificial Sequence
  Synthetic sequence
gagctctttccacccatg

SEQ ID NO: 3141 - DNA, 18 bp, Artificial Sequence
  Synthetic sequence
gagctctttccacccatg

SEQ ID NO: 3142 - DNA, 18 bp, Artificial Sequence
  Synthetic sequence
gctctttccacccatgtt

SEQ ID NO: 3143 - DNA, 18 bp, Artificial Sequence
  Synthetic sequence
gctctttccacccatgtt

SEQ ID NO: 3144 - DNA, 18 bp, Artificial Sequence
  Synthetic sequence
gctctttccacccatgtt

SEQ ID NO: 3145 - DNA, 18 bp, Artificial Sequence
  Synthetic sequence
gctctttccacccatgtt

SEQ ID NO: 3146 - DNA, 20 bp, Artificial Sequence
  Synthetic sequence
gagctctttccacccatgtt

SEQ ID NO: 3147 - DNA, 20 bp, Artificial Sequence
  Synthetic sequence
gagctctttccacccatgtt

SEQ ID NO: 3148 - DNA, 20 bp, Artificial Sequence
  Synthetic sequence
gagctctttccacccatgtt

SEQ ID NO: 3149 - DNA, 20 bp, Artificial Sequence
  Synthetic sequence
gagctctttccacccatgtt

SEQ ID NO: 3150 - DNA, 20 bp, Artificial Sequence
  Synthetic sequence
gagctctttccacccatgtt

SEQ ID NO: 3151 - DNA, 20 bp, Artificial Sequence
  Synthetic sequence
gagctctttccacccatgtt

SEQ ID NO: 3152 - DNA, 19 bp, Artificial Sequence
  Synthetic sequence
gagctctttccacccatgt

SEQ ID NO: 3153 - DNA, 19 bp, Artificial Sequence
  Synthetic sequence
gagctctttccacccatgt

SEQ ID NO: 3154 - DNA, 19 bp, Artificial Sequence
  Synthetic sequence
gagctctttccacccatgt

SEQ ID NO: 3155 - DNA, 19 bp, Artificial Sequence
  Synthetic sequence
agctctttccacccatgtt

SEQ ID NO: 3156 - DNA, 19 bp, Artificial Sequence
  Synthetic sequence
agctctttccacccatgtt

SEQ ID NO: 3157 - DNA, 19 bp, Artificial Sequence
  Synthetic sequence
agctctttccacccatgtt

SEQ ID NO: 3158 - DNA, 18 bp, Artificial Sequence
  Synthetic sequence
gagctctttccacccatg

SEQ ID NO: 3159 - DNA, 18 bp, Artificial Sequence
  Synthetic sequence
gagctctttccacccatg

SEQ ID NO: 3160 - DNA, 18 bp, Artificial Sequence
  Synthetic sequence
gagctctttccacccatg

SEQ ID NO: 3161 - DNA, 18 bp, Artificial Sequence
  Synthetic sequence
gctctttccacccatgtt

SEQ ID NO: 3162 - DNA, 18 bp, Artificial Sequence
  Synthetic sequence
gctctttccacccatgtt

SEQ ID NO: 3163 - DNA, 18 bp, Artificial Sequence
  Synthetic sequence
gctctttccacccatgtt

SEQ ID NO: 3164 - DNA, 17 bp, Artificial Sequence
  Synthetic sequence
gagctctttccacccat

SEQ ID NO: 3165 - DNA, 17 bp, Artificial Sequence
  Synthetic sequence
gagctctttccacccat

SEQ ID NO: 3166 - DNA, 17 bp, Artificial Sequence
  Synthetic sequence
gagctctttccacccat

SEQ ID NO: 3167 - DNA, 17 bp, Artificial Sequence
  Synthetic sequence
ctctttccacccatgtt

SEQ ID NO: 3168 - DNA, 17 bp, Artificial Sequence
  Synthetic sequence
ctctttccacccatgtt

SEQ ID NO: 3169 - DNA, 17 bp, Artificial Sequence
  Synthetic sequence
ctctttccacccatgtt

SEQ ID NO: 3170 - DNA, 19 bp, Artificial Sequence
  Synthetic sequence
agctctttccacccatgtt

SEQ ID NO: 3171 - DNA, 19 bp, Artificial Sequence
  Synthetic sequence
agctctttccacccatgtt

SEQ ID NO: 3172 - DNA, 19 bp, Artificial Sequence
  Synthetic sequence
gagctctttccacccatgt

SEQ ID NO: 3173 - DNA, 19 bp, Artificial Sequence
  Synthetic sequence
gagctctttccacccatgt

SEQ ID NO: 3174 - DNA, 18 bp, Artificial Sequence
  Synthetic sequence
agctctttccacccatgt

SEQ ID NO: 3175 - DNA, 18 bp, Artificial Sequence
  Synthetic sequence
agctctttccacccatgt

SEQ ID NO: 3176 - DNA, 18 bp, Artificial Sequence
  Synthetic sequence
agctctttccacccatgt

SEQ ID NO: 3177 - DNA, 18 bp, Artificial Sequence
  Synthetic sequence
agctctttccacccatgt

SEQ ID NO: 3178 - DNA, 17 bp, Artificial Sequence
  Synthetic sequence
agctctttccacccatg

SEQ ID NO: 3179 - DNA, 17 bp, Artificial Sequence
  Synthetic sequence
agctctttccacccatg

SEQ ID NO: 3180 - DNA, 17 bp, Artificial Sequence
  Synthetic sequence
agctctttccacccatg

SEQ ID NO: 3181 - DNA, 20 bp, Artificial Sequence
  Synthetic sequence
gagctctttccacccatgtt

SEQ ID NO: 3182 - DNA, 20 bp, Artificial Sequence
  Synthetic sequence
gagctctttccacccatgtt

SEQ ID NO: 3183 - DNA, 20 bp, Artificial Sequence
  Synthetic sequence
gagctctttccacccatgtt

SEQ ID NO: 3184 - DNA, 20 bp, Artificial Sequence
  Synthetic sequence
gagctctttccacccatgtt

SEQ ID NO: 3185 - DNA, 19 bp, Artificial Sequence
  Synthetic sequence
gagctctttccacccatgt

SEQ ID NO: 3186 - DNA, 19 bp, Artificial Sequence
  Synthetic sequence
agctctttccacccatgtt

SEQ ID NO: 3187 - DNA, 20 bp, Artificial Sequence
  Synthetic sequence
gagctctttccacccatgtt

SEQ ID NO: 3188 - DNA, 20 bp, Artificial Sequence
  Synthetic sequence
gagctctttccacccatgtt

SEQ ID NO: 3189 - DNA, 19 bp, Artificial Sequence
  Synthetic sequence
gagctctttccacccatgt

SEQ ID NO: 3190 - DNA, 20 bp, Artificial Sequence
  Synthetic sequence
gagctctttccacccatgtt

SEQ ID NO: 3191 - DNA, 18 bp, Artificial Sequence
  Synthetic sequence
gagctctttccacccatg

SEQ ID NO: 3192 - DNA, 18 bp, Artificial Sequence
  Synthetic sequence
gctctttccacccatgtt

SEQ ID NO: 3193 - DNA, 20 bp, Artificial Sequence
  Synthetic sequence
gagctctttccacccatgtt

SEQ ID NO: 3194 - DNA, 19 bp, Artificial Sequence
  Synthetic sequence
gagctctttccacccatgt

SEQ ID NO: 3195 - DNA, 18 bp, Artificial Sequence
  Synthetic sequence
gagctctttccacccatg

SEQ ID NO: 3196 - DNA, 18 bp, Artificial Sequence
  Synthetic sequence
gctctttccacccatgtt

SEQ ID NO: 3197 - DNA, 17 bp, Artificial Sequence
  Synthetic sequence
gagctctttccacccat

SEQ ID NO: 3198 - DNA, 17 bp, Artificial Sequence
  Synthetic sequence
ctctttccacccatgtt

SEQ ID NO: 3199 - DNA, 19 bp, Artificial Sequence
  Synthetic sequence
agctctttccacccatgtt

SEQ ID NO: 3200 - DNA, 18 bp, Artificial Sequence
  Synthetic sequence
agctctttccacccatgt

SEQ ID NO: 3201 - DNA, 17 bp, Artificial Sequence
  Synthetic sequence
agctctttccacccatg

SEQ ID NO: 3202 - DNA, 20 bp, Artificial Sequence
  Synthetic sequence
gagctctttccacccatgtt

SEQ ID NO: 3203 - DNA, 20 bp, Artificial Sequence
  Synthetic sequence
gagctctttccacccatgtt

SEQ ID NO: 3204 - DNA, 20 bp, Artificial Sequence
  Synthetic sequence
gagctctttccacccatgtt

SEQ ID NO: 3205 - DNA, 20 bp, Artificial Sequence
  Synthetic sequence
gagctctttccacccatgtt

SEQ ID NO: 3206 - DNA, 20 bp, Artificial Sequence
  Synthetic sequence
gagctctttccacccatgtt

SEQ ID NO: 3207 - DNA, 20 bp, Artificial Sequence
  Synthetic sequence
gagctctttccacccatgtt

SEQ ID NO: 3208 - DNA, 20 bp, Artificial Sequence
  Synthetic sequence
gagctctttccacccatgtt

SEQ ID NO: 3209 - DNA, 20 bp, Artificial Sequence
  Synthetic sequence
gagctctttccacccatgtt

SEQ ID NO: 3210 - DNA, 20 bp, Artificial Sequence
  Synthetic sequence
gagctctttccacccatgtt

SEQ ID NO: 3211 - DNA, 20 bp, Artificial Sequence
  Synthetic sequence
gagctctttccacccatgtt

SEQ ID NO: 3212 - DNA, 20 bp, Artificial Sequence
  Synthetic sequence
gagctctttccacccatgtt

SEQ ID NO: 3213 - DNA, 20 bp, Artificial Sequence
  Synthetic sequence
gagctctttccacccatgtt

SEQ ID NO: 3214 - DNA, 20 bp, Artificial Sequence
  Synthetic sequence
gagctctttccacccatgtt

SEQ ID NO: 3215 - DNA, 20 bp, Artificial Sequence
  Synthetic sequence
gagctctttccacccatgtt

SEQ ID NO: 3216 - DNA, 20 bp, Artificial Sequence
  Synthetic sequence
gagctctttccacccatgtt

SEQ ID NO: 3217 - DNA, 21 bp, Artificial Sequence
  Synthetic sequence
gagctctttccacccatgttt

SEQ ID NO: 3218 - DNA, 21 bp, Artificial Sequence
  Synthetic sequence
gagctctttccacccatgttt

SEQ ID NO: 3219 - DNA, 21 bp, Artificial Sequence
  Synthetic sequence
gagctctttccacccatgttt

SEQ ID NO: 3220 - DNA, 21 bp, Artificial Sequence
  Synthetic sequence
gagctctttccacccatgttt

SEQ ID NO: 3221 - DNA, 21 bp, Artificial Sequence
  Synthetic sequence
gagctctttccacccatgttt

SEQ ID NO: 3222 - DNA, 21 bp, Artificial Sequence
  Synthetic sequence
gagctctttccacccatgttt

SEQ ID NO: 3223 - DNA, 21 bp, Artificial Sequence
  Synthetic sequence
gagctctttccacccatgttt

SEQ ID NO: 3224 - DNA, 21 bp, Artificial Sequence
  Synthetic sequence
gagctctttccacccatgttt

SEQ ID NO: 3225 - DNA, 21 bp, Artificial Sequence
  Synthetic sequence
gagctctttccacccatgttt

SEQ ID NO: 3226 - DNA, 21 bp, Artificial Sequence
  Synthetic sequence
gagctctttccacccatgttt

SEQ ID NO: 3227 - DNA, 21 bp, Artificial Sequence
  Synthetic sequence
gagctctttccacccatgttt

SEQ ID NO: 3228 - DNA, 21 bp, Artificial Sequence
  Synthetic sequence
gagctctttccacccatgttt

SEQ ID NO: 3229 - DNA, 21 bp, Artificial Sequence
  Synthetic sequence
gagctctttccacccatgttt

SEQ ID NO: 3230 - DNA, 21 bp, Artificial Sequence
  Synthetic sequence
gagctctttccacccatgttt

SEQ ID NO: 3231 - DNA, 21 bp, Artificial Sequence
  Synthetic sequence
gagctctttccacccatgttt

SEQ ID NO: 3232 - DNA, 21 bp, Artificial Sequence
  Synthetic sequence
gagctctttccacccatgttt

SEQ ID NO: 3233 - DNA, 22 bp, Artificial Sequence
  Synthetic sequence
gagctctttccacccatgtttg

SEQ ID NO: 3234 - DNA, 22 bp, Artificial Sequence
  Synthetic sequence
gagctctttccacccatgtttg

SEQ ID NO: 3235 - DNA, 22 bp, Artificial Sequence
  Synthetic sequence
gagctctttccacccatgtttg

SEQ ID NO: 3236 - DNA, 22 bp, Artificial Sequence
  Synthetic sequence
gagctctttccacccatgtttg

SEQ ID NO: 3237 - DNA, 22 bp, Artificial Sequence
  Synthetic sequence
gagctctttccacccatgtttg

SEQ ID NO: 3238 - DNA, 22 bp, Artificial Sequence
  Synthetic sequence
gagctctttccacccatgtttg

SEQ ID NO: 3239 - DNA, 22 bp, Artificial Sequence
  Synthetic sequence
gagctctttccacccatgtttg

SEQ ID NO: 3240 - DNA, 22 bp, Artificial Sequence
  Synthetic sequence
gagctctttccacccatgtttg

SEQ ID NO: 3241 - DNA, 22 bp, Artificial Sequence
  Synthetic sequence
gagctctttccacccatgtttg

SEQ ID NO: 3242 - DNA, 22 bp, Artificial Sequence
  Synthetic sequence
gagctctttccacccatgtttg

SEQ ID NO: 3243 - DNA, 22 bp, Artificial Sequence
  Synthetic sequence
gagctctttccacccatgtttg

SEQ ID NO: 3244 - DNA, 22 bp, Artificial Sequence
  Synthetic sequence
gagctctttccacccatgtttg

SEQ ID NO: 3245 - DNA, 22 bp, Artificial Sequence
  Synthetic sequence
gagctctttccacccatgtttg

SEQ ID NO: 3246 - DNA, 22 bp, Artificial Sequence
  Synthetic sequence
gagctctttccacccatgtttg

SEQ ID NO: 3247 - DNA, 22 bp, Artificial Sequence
  Synthetic sequence
gagctctttccacccatgtttg

SEQ ID NO: 3248 - DNA, 22 bp, Artificial Sequence
  Synthetic sequence
gagctctttccacccatgtttg

SEQ ID NO: 3249 - DNA, 23 bp, Artificial Sequence
  Synthetic sequence
gagctctttccacccatgtttgg

SEQ ID NO: 3250 - DNA, 23 bp, Artificial Sequence
  Synthetic sequence
gagctctttccacccatgtttgg

SEQ ID NO: 3251 - DNA, 23 bp, Artificial Sequence
  Synthetic sequence
gagctctttccacccatgtttgg

SEQ ID NO: 3252 - DNA, 23 bp, Artificial Sequence
  Synthetic sequence
gagctctttccacccatgtttgg

SEQ ID NO: 3253 - DNA, 23 bp, Artificial Sequence
  Synthetic sequence
gagctctttccacccatgtttgg

SEQ ID NO: 3254 - DNA, 23 bp, Artificial Sequence
  Synthetic sequence
gagctctttccacccatgtttgg

SEQ ID NO: 3255 - DNA, 23 bp, Artificial Sequence
  Synthetic sequence
gagctctttccacccatgtttgg

SEQ ID NO: 3256 - DNA, 23 bp, Artificial Sequence
  Synthetic sequence
gagctctttccacccatgtttgg

SEQ ID NO: 3257 - DNA, 23 bp, Artificial Sequence
  Synthetic sequence
gagctctttccacccatgtttgg

SEQ ID NO: 3258 - DNA, 23 bp, Artificial Sequence
  Synthetic sequence
gagctctttccacccatgtttgg

SEQ ID NO: 3259 - DNA, 23 bp, Artificial Sequence
  Synthetic sequence
gagctctttccacccatgtttgg

SEQ ID NO: 3260 - DNA, 23 bp, Artificial Sequence
  Synthetic sequence
gagctctttccacccatgtttgg

SEQ ID NO: 3261 - DNA, 23 bp, Artificial Sequence
  Synthetic sequence
gagctctttccacccatgtttgg

SEQ ID NO: 3262 - DNA, 23 bp, Artificial Sequence
  Synthetic sequence
gagctctttccacccatgtttgg

SEQ ID NO: 3263 - DNA, 23 bp, Artificial Sequence
  Synthetic sequence
gagctctttccacccatgtttgg

SEQ ID NO: 3264 - DNA, 23 bp, Artificial Sequence
  Synthetic sequence
gagctctttccacccatgtttgg

SEQ ID NO: 3265 - DNA, 21 bp, Artificial Sequence
  Synthetic sequence
gagctctttccacccatgttt

SEQ ID NO: 3266 - DNA, 21 bp, Artificial Sequence
  Synthetic sequence
gagctctttccacccatgttt

SEQ ID NO: 3267 - DNA, 21 bp, Artificial Sequence
  Synthetic sequence
gagctctttccacccatgttt

SEQ ID NO: 3268 - DNA, 21 bp, Artificial Sequence
  Synthetic sequence
gagctctttccacccatgttt

SEQ ID NO: 3269 - DNA, 21 bp, Artificial Sequence
  Synthetic sequence
gagctctttccacccatgttt

SEQ ID NO: 3270 - DNA, 21 bp, Artificial Sequence
  Synthetic sequence
gagctctttccacccatgttt

SEQ ID NO: 3271 - DNA, 21 bp, Artificial Sequence
  Synthetic sequence
gagctctttccacccatgttt

SEQ ID NO: 3272 - DNA, 21 bp, Artificial Sequence
  Synthetic sequence
gagctctttccacccatgttt

SEQ ID NO: 3273 - DNA, 21 bp, Artificial Sequence
  Synthetic sequence
gagctctttccacccatgttt

SEQ ID NO: 3274 - DNA, 21 bp, Artificial Sequence
  Synthetic sequence
gagctctttccacccatgttt

SEQ ID NO: 3275 - DNA, 21 bp, Artificial Sequence
  Synthetic sequence
gagctctttccacccatgttt

SEQ ID NO: 3276 - DNA, 21 bp, Artificial Sequence
  Synthetic sequence
gagctctttccacccatgttt

SEQ ID NO: 3277 - DNA, 21 bp, Artificial Sequence
  Synthetic sequence
gagctctttccacccatgttt

SEQ ID NO: 3278 - DNA, 21 bp, Artificial Sequence
  Synthetic sequence
gagctctttccacccatgttt

SEQ ID NO: 3279 - DNA, 21 bp, Artificial Sequence
  Synthetic sequence
gagctctttccacccatgttt

SEQ ID NO: 3280 - DNA, 21 bp, Artificial Sequence
  Synthetic sequence
gagctctttccacccatgttt

SEQ ID NO: 3281 - DNA, 22 bp, Artificial Sequence
  Synthetic sequence
gagctctttccacccatgtttg

SEQ ID NO: 3282 - DNA, 22 bp, Artificial Sequence
  Synthetic sequence
gagctctttccacccatgtttg

SEQ ID NO: 3283 - DNA, 22 bp, Artificial Sequence
  Synthetic sequence
gagctctttccacccatgtttg

SEQ ID NO: 3284 - DNA, 22 bp, Artificial Sequence
  Synthetic sequence
gagctctttccacccatgtttg

SEQ ID NO: 3285 - DNA, 22 bp, Artificial Sequence
  Synthetic sequence
gagctctttccacccatgtttg

SEQ ID NO: 3286 - DNA, 22 bp, Artificial Sequence
  Synthetic sequence
gagctctttccacccatgtttg

SEQ ID NO: 3287 - DNA, 22 bp, Artificial Sequence
  Synthetic sequence
gagctctttccacccatgtttg

SEQ ID NO: 3288 - DNA, 22 bp, Artificial Sequence
  Synthetic sequence
gagctctttccacccatgtttg

SEQ ID NO: 3289 - DNA, 22 bp, Artificial Sequence
  Synthetic sequence
gagctctttccacccatgtttg

SEQ ID NO: 3290 - DNA, 22 bp, Artificial Sequence
  Synthetic sequence
gagctctttccacccatgtttg

SEQ ID NO: 3291 - DNA, 22 bp, Artificial Sequence
  Synthetic sequence
gagctctttccacccatgtttg

SEQ ID NO: 3292 - DNA, 22 bp, Artificial Sequence
  Synthetic sequence
gagctctttccacccatgtttg

SEQ ID NO: 3293 - DNA, 22 bp, Artificial Sequence
  Synthetic sequence
gagctctttccacccatgtttg

SEQ ID NO: 3294 - DNA, 22 bp, Artificial Sequence
  Synthetic sequence
gagctctttccacccatgtttg

SEQ ID NO: 3295 - DNA, 22 bp, Artificial Sequence
  Synthetic sequence
gagctctttccacccatgtttg

SEQ ID NO: 3296 - DNA, 22 bp, Artificial Sequence
  Synthetic sequence
gagctctttccacccatgtttg

SEQ ID NO: 3297 - DNA, 20 bp, Artificial Sequence
  Synthetic sequence
ggagctctttccacccatgt

SEQ ID NO: 3298 - DNA, 20 bp, Artificial Sequence
  Synthetic sequence
ggagctctttccacccatgt

SEQ ID NO: 3299 - DNA, 20 bp, Artificial Sequence
  Synthetic sequence
ggagctctttccacccatgt

SEQ ID NO: 3300 - DNA, 20 bp, Artificial Sequence
  Synthetic sequence
ggagctctttccacccatgt

SEQ ID NO: 3301 - DNA, 20 bp, Artificial Sequence
  Synthetic sequence
ggagctctttccacccatgt

SEQ ID NO: 3302 - DNA, 20 bp, Artificial Sequence
  Synthetic sequence
ggagctctttccacccatgt

SEQ ID NO: 3303 - DNA, 20 bp, Artificial Sequence
  Synthetic sequence
ggagctctttccacccatgt

SEQ ID NO: 3304 - DNA, 20 bp, Artificial Sequence
  Synthetic sequence
ggagctctttccacccatgt

SEQ ID NO: 3305 - DNA, 20 bp, Artificial Sequence
  Synthetic sequence
ggagctctttccacccatgt

SEQ ID NO: 3306 - DNA, 20 bp, Artificial Sequence
  Synthetic sequence
ggagctctttccacccatgt

SEQ ID NO: 3307 - DNA, 20 bp, Artificial Sequence
  Synthetic sequence
ggagctctttccacccatgt

SEQ ID NO: 3308 - DNA, 20 bp, Artificial Sequence
  Synthetic sequence
ggagctctttccacccatgt

SEQ ID NO: 3309 - DNA, 20 bp, Artificial Sequence
  Synthetic sequence
ggagctctttccacccatgt

SEQ ID NO: 3310 - DNA, 20 bp, Artificial Sequence
  Synthetic sequence
ggagctctttccacccatgt

SEQ ID NO: 3311 - DNA, 20 bp, Artificial Sequence
  Synthetic sequence
ggagctctttccacccatgt

SEQ ID NO: 3312 - DNA, 20 bp, Artificial Sequence
  Synthetic sequence
ggagctctttccacccatgt

SEQ ID NO: 3313 - DNA, 20 bp, Artificial Sequence
  Synthetic sequence
ggagctctttccacccatgt

SEQ ID NO: 3314 - DNA, 20 bp, Artificial Sequence
  Synthetic sequence
ggagctctttccacccatgt

SEQ ID NO: 3315 - DNA, 20 bp, Artificial Sequence
  Synthetic sequence
ggagctctttccacccatgt

SEQ ID NO: 3316 - DNA, 20 bp, Artificial Sequence
  Synthetic sequence
ggagctctttccacccatgt

SEQ ID NO: 3317 - DNA, 20 bp, Artificial Sequence
  Synthetic sequence
ggagctctttccacccatgt

SEQ ID NO: 3318 - DNA, 20 bp, Artificial Sequence
  Synthetic sequence
ggagctctttccacccatgt

SEQ ID NO: 3319 - DNA, 19 bp, Artificial Sequence
  Synthetic sequence
ggagctctttccacccatg

SEQ ID NO: 3320 - DNA, 19 bp, Artificial Sequence
  Synthetic sequence
ggagctctttccacccatg

SEQ ID NO: 3321 - DNA, 19 bp, Artificial Sequence
  Synthetic sequence
ggagctctttccacccatg

SEQ ID NO: 3322 - DNA, 19 bp, Artificial Sequence
  Synthetic sequence
ggagctctttccacccatg

SEQ ID NO: 3323 - DNA, 19 bp, Artificial Sequence
  Synthetic sequence
ggagctctttccacccatg

SEQ ID NO: 3324 - DNA, 19 bp, Artificial Sequence
  Synthetic sequence
gagctctttccacccatgt

SEQ ID NO: 3325 - DNA, 19 bp, Artificial Sequence
  Synthetic sequence
gagctctttccacccatgt

SEQ ID NO: 3326 - DNA, 19 bp, Artificial Sequence
  Synthetic sequence
gagctctttccacccatgt

SEQ ID NO: 3327 - DNA, 19 bp, Artificial Sequence
  Synthetic sequence
gagctctttccacccatgt

SEQ ID NO: 3328 - DNA, 19 bp, Artificial Sequence
  Synthetic sequence
gagctctttccacccatgt

SEQ ID NO: 3329 - DNA, 20 bp, Artificial Sequence
  Synthetic sequence
ggagctctttccacccatgt

SEQ ID NO: 3330 - DNA, 20 bp, Artificial Sequence
  Synthetic sequence
ggagctctttccacccatgt

SEQ ID NO: 3331 - DNA, 20 bp, Artificial Sequence
  Synthetic sequence
ggagctctttccacccatgt

SEQ ID NO: 3332 - DNA, 20 bp, Artificial Sequence
  Synthetic sequence
ggagctctttccacccatgt

SEQ ID NO: 3333 - DNA, 20 bp, Artificial Sequence
  Synthetic sequence
ggagctctttccacccatgt

SEQ ID NO: 3334 - DNA, 20 bp, Artificial Sequence
  Synthetic sequence
ggagctctttccacccatgt

SEQ ID NO: 3335 - DNA, 20 bp, Artificial Sequence
  Synthetic sequence
ggagctctttccacccatgt

SEQ ID NO: 3336 - DNA, 20 bp, Artificial Sequence
  Synthetic sequence
ggagctctttccacccatgt

SEQ ID NO: 3337 - DNA, 19 bp, Artificial Sequence
  Synthetic sequence
ggagctctttccacccatg

SEQ ID NO: 3338 - DNA, 19 bp, Artificial Sequence
  Synthetic sequence
ggagctctttccacccatg

SEQ ID NO: 3339 - DNA, 19 bp, Artificial Sequence
  Synthetic sequence
ggagctctttccacccatg

SEQ ID NO: 3340 - DNA, 19 bp, Artificial Sequence
  Synthetic sequence
ggagctctttccacccatg

SEQ ID NO: 3341 - DNA, 20 bp, Artificial Sequence
  Synthetic sequence
ggagctctttccacccatgt

SEQ ID NO: 3342 - DNA, 20 bp, Artificial Sequence
  Synthetic sequence
ggagctctttccacccatgt

SEQ ID NO: 3343 - DNA, 20 bp, Artificial Sequence
  Synthetic sequence
ggagctctttccacccatgt

SEQ ID NO: 3344 - DNA, 18 bp, Artificial Sequence
  Synthetic sequence
ggagctctttccacccat

SEQ ID NO: 3345 - DNA, 18 bp, Artificial Sequence
  Synthetic sequence
ggagctctttccacccat

SEQ ID NO: 3346 - DNA, 18 bp, Artificial Sequence
  Synthetic sequence
ggagctctttccacccat

SEQ ID NO: 3347 - DNA, 18 bp, Artificial Sequence
  Synthetic sequence
ggagctctttccacccat

SEQ ID NO: 3348 - DNA, 18 bp, Artificial Sequence
  Synthetic sequence
agctctttccacccatgt

SEQ ID NO: 3349 - DNA, 18 bp, Artificial Sequence
  Synthetic sequence
agctctttccacccatgt

SEQ ID NO: 3350 - DNA, 18 bp, Artificial Sequence
  Synthetic sequence
agctctttccacccatgt

SEQ ID NO: 3351 - DNA, 18 bp, Artificial Sequence
  Synthetic sequence
agctctttccacccatgt

SEQ ID NO: 3352 - DNA, 20 bp, Artificial Sequence
  Synthetic sequence
ggagctctttccacccatgt

SEQ ID NO: 3353 - DNA, 20 bp, Artificial Sequence
  Synthetic sequence
ggagctctttccacccatgt

SEQ ID NO: 3354 - DNA, 20 bp, Artificial Sequence
  Synthetic sequence
ggagctctttccacccatgt

SEQ ID NO: 3355 - DNA, 20 bp, Artificial Sequence
  Synthetic sequence
ggagctctttccacccatgt

SEQ ID NO: 3356 - DNA, 20 bp, Artificial Sequence
  Synthetic sequence
ggagctctttccacccatgt

SEQ ID NO: 3357 - DNA, 20 bp, Artificial Sequence
  Synthetic sequence
ggagctctttccacccatgt

SEQ ID NO: 3358 - DNA, 19 bp, Artificial Sequence
  Synthetic sequence
ggagctctttccacccatg

SEQ ID NO: 3359 - DNA, 19 bp, Artificial Sequence
  Synthetic sequence
ggagctctttccacccatg

SEQ ID NO: 3360 - DNA, 19 bp, Artificial Sequence
  Synthetic sequence
ggagctctttccacccatg

SEQ ID NO: 3361 - DNA, 19 bp, Artificial Sequence
  Synthetic sequence
gagctctttccacccatgt

SEQ ID NO: 3362 - DNA, 19 bp, Artificial Sequence
  Synthetic sequence
gagctctttccacccatgt

SEQ ID NO: 3363 - DNA, 19 bp, Artificial Sequence
  Synthetic sequence
gagctctttccacccatgt

SEQ ID NO: 3364 - DNA, 18 bp, Artificial Sequence
  Synthetic sequence
ggagctctttccacccat

SEQ ID NO: 3365 - DNA, 18 bp, Artificial Sequence
  Synthetic sequence
ggagctctttccacccat

SEQ ID NO: 3366 - DNA, 18 bp, Artificial Sequence
  Synthetic sequence
ggagctctttccacccat

SEQ ID NO: 3367 - DNA, 18 bp, Artificial Sequence
  Synthetic sequence
agctctttccacccatgt

SEQ ID NO: 3368 - DNA, 18 bp, Artificial Sequence
  Synthetic sequence
agctctttccacccatgt

SEQ ID NO: 3369 - DNA, 18 bp, Artificial Sequence
  Synthetic sequence
agctctttccacccatgt

SEQ ID NO: 3370 - DNA, 17 bp, Artificial Sequence
  Synthetic sequence
ggagctctttccaccca

SEQ ID NO: 3371 - DNA, 17 bp, Artificial Sequence
  Synthetic sequence
ggagctctttccaccca

SEQ ID NO: 3372 - DNA, 17 bp, Artificial Sequence
  Synthetic sequence
ggagctctttccaccca

SEQ ID NO: 3373 - DNA, 17 bp, Artificial Sequence
  Synthetic sequence
gctctttccacccatgt

SEQ ID NO: 3374 - DNA, 17 bp, Artificial Sequence
  Synthetic sequence
gctctttccacccatgt

SEQ ID NO: 3375 - DNA, 17 bp, Artificial Sequence
  Synthetic sequence
gctctttccacccatgt

SEQ ID NO: 3376 - DNA, 19 bp, Artificial Sequence
  Synthetic sequence
gagctctttccacccatgt

SEQ ID NO: 3377 - DNA, 19 bp, Artificial Sequence
  Synthetic sequence
gagctctttccacccatgt

SEQ ID NO: 3378 - DNA, 19 bp, Artificial Sequence
  Synthetic sequence
ggagctctttccacccatg

SEQ ID NO: 3379 - DNA, 19 bp, Artificial Sequence
  Synthetic sequence
ggagctctttccacccatg

SEQ ID NO: 3380 - DNA, 18 bp, Artificial Sequence
  Synthetic sequence
gagctctttccacccatg

SEQ ID NO: 3381 - DNA, 18 bp, Artificial Sequence
  Synthetic sequence
gagctctttccacccatg

SEQ ID NO: 3382 - DNA, 18 bp, Artificial Sequence
  Synthetic sequence
gagctctttccacccatg

SEQ ID NO: 3383 - DNA, 18 bp, Artificial Sequence
  Synthetic sequence
gagctctttccacccatg

SEQ ID NO: 3384 - DNA, 17 bp, Artificial Sequence
  Synthetic sequence
gagctctttccacccat

SEQ ID NO: 3385 - DNA, 17 bp, Artificial Sequence
  Synthetic sequence
gagctctttccacccat

SEQ ID NO: 3386 - DNA, 17 bp, Artificial Sequence
  Synthetic sequence
gagctctttccacccat

SEQ ID NO: 3387 - DNA, 20 bp, Artificial Sequence
  Synthetic sequence
ggagctctttccacccatgt

SEQ ID NO: 3388 - DNA, 20 bp, Artificial Sequence
  Synthetic sequence
ggagctctttccacccatgt

SEQ ID NO: 3389 - DNA, 20 bp, Artificial Sequence
  Synthetic sequence
ggagctctttccacccatgt

SEQ ID NO: 3390 - DNA, 20 bp, Artificial Sequence
  Synthetic sequence
ggagctctttccacccatgt

SEQ ID NO: 3391 - DNA, 19 bp, Artificial Sequence
  Synthetic sequence
ggagctctttccacccatg

SEQ ID NO: 3392 - DNA, 19 bp, Artificial Sequence
  Synthetic sequence
gagctctttccacccatgt

SEQ ID NO: 3393 - DNA, 20 bp, Artificial Sequence
  Synthetic sequence
ggagctctttccacccatgt

SEQ ID NO: 3394 - DNA, 20 bp, Artificial Sequence
  Synthetic sequence
ggagctctttccacccatgt

SEQ ID NO: 3395 - DNA, 19 bp, Artificial Sequence
  Synthetic sequence
ggagctctttccacccatg

SEQ ID NO: 3396 - DNA, 20 bp, Artificial Sequence
  Synthetic sequence
ggagctctttccacccatgt

SEQ ID NO: 3397 - DNA, 18 bp, Artificial Sequence
  Synthetic sequence
ggagctctttccacccat

SEQ ID NO: 3398 - DNA, 18 bp, Artificial Sequence
  Synthetic sequence
agctctttccacccatgt

SEQ ID NO: 3399 - DNA, 20 bp, Artificial Sequence
  Synthetic sequence
ggagctctttccacccatgt

SEQ ID NO: 3400 - DNA, 19 bp, Artificial Sequence
  Synthetic sequence
ggagctctttccacccatg

SEQ ID NO: 3401 - DNA, 18 bp, Artificial Sequence
  Synthetic sequence
ggagctctttccacccat

SEQ ID NO: 3402 - DNA, 18 bp, Artificial Sequence
  Synthetic sequence
agctctttccacccatgt

SEQ ID NO: 3403 - DNA, 17 bp, Artificial Sequence
  Synthetic sequence
ggagctctttccaccca

SEQ ID NO: 3404 - DNA, 17 bp, Artificial Sequence
  Synthetic sequence
gctctttccacccatgt

SEQ ID NO: 3405 - DNA, 19 bp, Artificial Sequence
  Synthetic sequence
gagctctttccacccatgt

SEQ ID NO: 3406 - DNA, 18 bp, Artificial Sequence
  Synthetic sequence
gagctctttccacccatg

SEQ ID NO: 3407 - DNA, 17 bp, Artificial Sequence
  Synthetic sequence
gagctctttccacccat

SEQ ID NO: 3408 - DNA, 20 bp, Artificial Sequence
  Synthetic sequence
ggagctctttccacccatgt

SEQ ID NO: 3409 - DNA, 20 bp, Artificial Sequence
  Synthetic sequence
ggagctctttccacccatgt

SEQ ID NO: 3410 - DNA, 20 bp, Artificial Sequence
  Synthetic sequence
ggagctctttccacccatgt

SEQ ID NO: 3411 - DNA, 20 bp, Artificial Sequence
  Synthetic sequence
ggagctctttccacccatgt

SEQ ID NO: 3412 - DNA, 20 bp, Artificial Sequence
  Synthetic sequence
ggagctctttccacccatgt

SEQ ID NO: 3413 - DNA, 20 bp, Artificial Sequence
  Synthetic sequence
ggagctctttccacccatgt

SEQ ID NO: 3414 - DNA, 20 bp, Artificial Sequence
  Synthetic sequence
ggagctctttccacccatgt

SEQ ID NO: 3415 - DNA, 20 bp, Artificial Sequence
  Synthetic sequence
ggagctctttccacccatgt

SEQ ID NO: 3416 - DNA, 20 bp, Artificial Sequence
  Synthetic sequence
ggagctctttccacccatgt

SEQ ID NO: 3417 - DNA, 20 bp, Artificial Sequence
  Synthetic sequence
ggagctctttccacccatgt

SEQ ID NO: 3418 - DNA, 20 bp, Artificial Sequence
  Synthetic sequence
ggagctctttccacccatgt

SEQ ID NO: 3419 - DNA, 20 bp, Artificial Sequence
  Synthetic sequence
ggagctctttccacccatgt

SEQ ID NO: 3420 - DNA, 20 bp, Artificial Sequence
  Synthetic sequence
ggagctctttccacccatgt

SEQ ID NO: 3421 - DNA, 20 bp, Artificial Sequence
  Synthetic sequence
ggagctctttccacccatgt

SEQ ID NO: 3422 - DNA, 20 bp, Artificial Sequence
  Synthetic sequence
ggagctctttccacccatgt

SEQ ID NO: 3423 - DNA, 21 bp, Artificial Sequence
  Synthetic sequence
ggagctctttccacccatgtt

SEQ ID NO: 3424 - DNA, 21 bp, Artificial Sequence
  Synthetic sequence
ggagctctttccacccatgtt

SEQ ID NO: 3425 - DNA, 21 bp, Artificial Sequence
  Synthetic sequence
ggagctctttccacccatgtt

SEQ ID NO: 3426 - DNA, 21 bp, Artificial Sequence
  Synthetic sequence
ggagctctttccacccatgtt

SEQ ID NO: 3427 - DNA, 21 bp, Artificial Sequence
  Synthetic sequence
ggagctctttccacccatgtt

SEQ ID NO: 3428 - DNA, 21 bp, Artificial Sequence
  Synthetic sequence
ggagctctttccacccatgtt

SEQ ID NO: 3429 - DNA, 21 bp, Artificial Sequence
  Synthetic sequence
ggagctctttccacccatgtt

SEQ ID NO: 3430 - DNA, 21 bp, Artificial Sequence
  Synthetic sequence
ggagctctttccacccatgtt

SEQ ID NO: 3431 - DNA, 21 bp, Artificial Sequence
  Synthetic sequence
ggagctctttccacccatgtt

SEQ ID NO: 3432 - DNA, 21 bp, Artificial Sequence
  Synthetic sequence
ggagctctttccacccatgtt

SEQ ID NO: 3433 - DNA, 21 bp, Artificial Sequence
  Synthetic sequence
ggagctctttccacccatgtt

SEQ ID NO: 3434 - DNA, 21 bp, Artificial Sequence
  Synthetic sequence
ggagctctttccacccatgtt

SEQ ID NO: 3435 - DNA, 21 bp, Artificial Sequence
  Synthetic sequence
ggagctctttccacccatgtt

SEQ ID NO: 3436 - DNA, 21 bp, Artificial Sequence
  Synthetic sequence
ggagctctttccacccatgtt

SEQ ID NO: 3437 - DNA, 21 bp, Artificial Sequence
  Synthetic sequence
ggagctctttccacccatgtt

SEQ ID NO: 3438 - DNA, 21 bp, Artificial Sequence
  Synthetic sequence
ggagctctttccacccatgtt

SEQ ID NO: 3439 - DNA, 22 bp, Artificial Sequence
  Synthetic sequence
ggagctctttccacccatgttt

SEQ ID NO: 3440 - DNA, 22 bp, Artificial Sequence
  Synthetic sequence
ggagctctttccacccatgttt

SEQ ID NO: 3441 - DNA, 22 bp, Artificial Sequence
  Synthetic sequence
ggagctctttccacccatgttt

SEQ ID NO: 3442 - DNA, 22 bp, Artificial Sequence
  Synthetic sequence
ggagctctttccacccatgttt

SEQ ID NO: 3443 - DNA, 22 bp, Artificial Sequence
  Synthetic sequence
ggagctctttccacccatgttt

SEQ ID NO: 3444 - DNA, 22 bp, Artificial Sequence
  Synthetic sequence
ggagctctttccacccatgttt

SEQ ID NO: 3445 - DNA, 22 bp, Artificial Sequence
  Synthetic sequence
ggagctctttccacccatgttt

SEQ ID NO: 3446 - DNA, 22 bp, Artificial Sequence
  Synthetic sequence
ggagctctttccacccatgttt

SEQ ID NO: 3447 - DNA, 22 bp, Artificial Sequence
  Synthetic sequence
ggagctctttccacccatgttt

SEQ ID NO: 3448 - DNA, 22 bp, Artificial Sequence
  Synthetic sequence
ggagctctttccacccatgttt

SEQ ID NO: 3449 - DNA, 22 bp, Artificial Sequence
  Synthetic sequence
ggagctctttccacccatgttt

SEQ ID NO: 3450 - DNA, 22 bp, Artificial Sequence
  Synthetic sequence
ggagctctttccacccatgttt

SEQ ID NO: 3451 - DNA, 22 bp, Artificial Sequence
  Synthetic sequence
ggagctctttccacccatgttt

SEQ ID NO: 3452 - DNA, 22 bp, Artificial Sequence
  Synthetic sequence
ggagctctttccacccatgttt

SEQ ID NO: 3453 - DNA, 22 bp, Artificial Sequence
  Synthetic sequence
ggagctctttccacccatgttt

SEQ ID NO: 3454 - DNA, 22 bp, Artificial Sequence
  Synthetic sequence
ggagctctttccacccatgttt

SEQ ID NO: 3455 - DNA, 23 bp, Artificial Sequence
  Synthetic sequence
ggagctctttccacccatgtttg

SEQ ID NO: 3456 - DNA, 23 bp, Artificial Sequence
  Synthetic sequence
ggagctctttccacccatgtttg

SEQ ID NO: 3457 - DNA, 23 bp, Artificial Sequence
  Synthetic sequence
ggagctctttccacccatgtttg

SEQ ID NO: 3458 - DNA, 23 bp, Artificial Sequence
  Synthetic sequence
ggagctctttccacccatgtttg

SEQ ID NO: 3459 - DNA, 23 bp, Artificial Sequence
  Synthetic sequence
ggagctctttccacccatgtttg

SEQ ID NO: 3460 - DNA, 23 bp, Artificial Sequence
  Synthetic sequence
ggagctctttccacccatgtttg

SEQ ID NO: 3461 - DNA, 23 bp, Artificial Sequence
  Synthetic sequence
ggagctctttccacccatgtttg

SEQ ID NO: 3462 - DNA, 23 bp, Artificial Sequence
  Synthetic sequence
ggagctctttccacccatgtttg

SEQ ID NO: 3463 - DNA, 23 bp, Artificial Sequence
  Synthetic sequence
ggagctctttccacccatgtttg

SEQ ID NO: 3464 - DNA, 23 bp, Artificial Sequence
  Synthetic sequence
ggagctctttccacccatgtttg

SEQ ID NO: 3465 - DNA, 23 bp, Artificial Sequence
  Synthetic sequence
ggagctctttccacccatgtttg

SEQ ID NO: 3466 - DNA, 23 bp, Artificial Sequence
  Synthetic sequence
ggagctctttccacccatgtttg

SEQ ID NO: 3467 - DNA, 23 bp, Artificial Sequence
  Synthetic sequence
ggagctctttccacccatgtttg

SEQ ID NO: 3468 - DNA, 23 bp, Artificial Sequence
  Synthetic sequence
ggagctctttccacccatgtttg

SEQ ID NO: 3469 - DNA, 23 bp, Artificial Sequence
  Synthetic sequence
ggagctctttccacccatgtttg

SEQ ID NO: 3470 - DNA, 23 bp, Artificial Sequence
  Synthetic sequence
ggagctctttccacccatgtttg

SEQ ID NO: 3471 - DNA, 21 bp, Artificial Sequence
  Synthetic sequence
ggagctctttccacccatgtt

SEQ ID NO: 3472 - DNA, 21 bp, Artificial Sequence
  Synthetic sequence
ggagctctttccacccatgtt

SEQ ID NO: 3473 - DNA, 21 bp, Artificial Sequence
  Synthetic sequence
ggagctctttccacccatgtt

SEQ ID NO: 3474 - DNA, 21 bp, Artificial Sequence
  Synthetic sequence
ggagctctttccacccatgtt

SEQ ID NO: 3475 - DNA, 21 bp, Artificial Sequence
  Synthetic sequence
ggagctctttccacccatgtt

SEQ ID NO: 3476 - DNA, 21 bp, Artificial Sequence
  Synthetic sequence
ggagctctttccacccatgtt

SEQ ID NO: 3477 - DNA, 21 bp, Artificial Sequence
  Synthetic sequence
ggagctctttccacccatgtt

SEQ ID NO: 3478 - DNA, 21 bp, Artificial Sequence
  Synthetic sequence
ggagctctttccacccatgtt

SEQ ID NO: 3479 - DNA, 21 bp, Artificial Sequence
  Synthetic sequence
ggagctctttccacccatgtt

SEQ ID NO: 3480 - DNA, 21 bp, Artificial Sequence
  Synthetic sequence
ggagctctttccacccatgtt

SEQ ID NO: 3481 - DNA, 21 bp, Artificial Sequence
  Synthetic sequence
ggagctctttccacccatgtt

SEQ ID NO: 3482 - DNA, 21 bp, Artificial Sequence
  Synthetic sequence
ggagctctttccacccatgtt

SEQ ID NO: 3483 - DNA, 21 bp, Artificial Sequence
  Synthetic sequence
ggagctctttccacccatgtt

SEQ ID NO: 3484 - DNA, 21 bp, Artificial Sequence
  Synthetic sequence
ggagctctttccacccatgtt

SEQ ID NO: 3485 - DNA, 21 bp, Artificial Sequence
  Synthetic sequence
ggagctctttccacccatgtt

SEQ ID NO: 3486 - DNA, 21 bp, Artificial Sequence
  Synthetic sequence
ggagctctttccacccatgtt

SEQ ID NO: 3487 - DNA, 22 bp, Artificial Sequence
  Synthetic sequence
ggagctctttccacccatgttt

SEQ ID NO: 3488 - DNA, 22 bp, Artificial Sequence
  Synthetic sequence
ggagctctttccacccatgttt

SEQ ID NO: 3489 - DNA, 22 bp, Artificial Sequence
  Synthetic sequence
ggagctctttccacccatgttt

SEQ ID NO: 3490 - DNA, 22 bp, Artificial Sequence
  Synthetic sequence
ggagctctttccacccatgttt

SEQ ID NO: 3491 - DNA, 22 bp, Artificial Sequence
  Synthetic sequence
ggagctctttccacccatgttt

SEQ ID NO: 3492 - DNA, 22 bp, Artificial Sequence
  Synthetic sequence
ggagctctttccacccatgttt

SEQ ID NO: 3493 - DNA, 22 bp, Artificial Sequence
  Synthetic sequence
ggagctctttccacccatgttt

SEQ ID NO: 3494 - DNA, 22 bp, Artificial Sequence
  Synthetic sequence
ggagctctttccacccatgttt

SEQ ID NO: 3495 - DNA, 22 bp, Artificial Sequence
  Synthetic sequence
ggagctctttccacccatgttt

SEQ ID NO: 3496 - DNA, 22 bp, Artificial Sequence
  Synthetic sequence
ggagctctttccacccatgttt

SEQ ID NO: 3497 - DNA, 22 bp, Artificial Sequence
  Synthetic sequence
ggagctctttccacccatgttt

SEQ ID NO: 3498 - DNA, 22 bp, Artificial Sequence
  Synthetic sequence
ggagctctttccacccatgttt

SEQ ID NO: 3499 - DNA, 22 bp, Artificial Sequence
  Synthetic sequence
ggagctctttccacccatgttt

SEQ ID NO: 3500 - DNA, 22 bp, Artificial Sequence
  Synthetic sequence
ggagctctttccacccatgttt

SEQ ID NO: 3501 - DNA, 22 bp, Artificial Sequence
  Synthetic sequence
ggagctctttccacccatgttt

SEQ ID NO: 3502 - DNA, 22 bp, Artificial Sequence
  Synthetic sequence
ggagctctttccacccatgttt

SEQ ID NO: 3503 - DNA, 20 bp, Artificial Sequence
  Synthetic sequence
tggtaatcaatgcaacttgt

SEQ ID NO: 3504 - DNA, 20 bp, Artificial Sequence
  Synthetic sequence
tggtaatcaatgcaacttgt

SEQ ID NO: 3505 - DNA, 20 bp, Artificial Sequence
  Synthetic sequence
tggtaatcaatgcaacttgt

SEQ ID NO: 3506 - DNA, 20 bp, Artificial Sequence
  Synthetic sequence
tggtaatcaatgcaacttgt

SEQ ID NO: 3507 - DNA, 20 bp, Artificial Sequence
  Synthetic sequence
tggtaatcaatgcaacttgt

SEQ ID NO: 3508 - DNA, 20 bp, Artificial Sequence
  Synthetic sequence
tggtaatcaatgcaacttgt

SEQ ID NO: 3509 - DNA, 20 bp, Artificial Sequence
  Synthetic sequence
tggtaatcaatgcaacttgt

SEQ ID NO: 3510 - DNA, 20 bp, Artificial Sequence
  Synthetic sequence
tggtaatcaatgcaacttgt

SEQ ID NO: 3511 - DNA, 20 bp, Artificial Sequence
  Synthetic sequence
tggtaatcaatgcaacttgt

SEQ ID NO: 3512 - DNA, 20 bp, Artificial Sequence
  Synthetic sequence
tggtaatcaatgcaacttgt

SEQ ID NO: 3513 - DNA, 20 bp, Artificial Sequence
  Synthetic sequence
tggtaatcaatgcaacttgt

SEQ ID NO: 3514 - DNA, 20 bp, Artificial Sequence
  Synthetic sequence
tggtaatcaatgcaacttgt

SEQ ID NO: 3515 - DNA, 20 bp, Artificial Sequence
  Synthetic sequence
tggtaatcaatgcaacttgt

SEQ ID NO: 3516 - DNA, 20 bp, Artificial Sequence
  Synthetic sequence
tggtaatcaatgcaacttgt

SEQ ID NO: 3517 - DNA, 20 bp, Artificial Sequence
  Synthetic sequence
tggtaatcaatgcaacttgt

SEQ ID NO: 3518 - DNA, 20 bp, Artificial Sequence
  Synthetic sequence
tggtaatcaatgcaacttgt

SEQ ID NO: 3519 - DNA, 20 bp, Artificial Sequence
  Synthetic sequence
tggtaatcaatgcaacttgt

SEQ ID NO: 3520 - DNA, 20 bp, Artificial Sequence
  Synthetic sequence
tggtaatcaatgcaacttgt

SEQ ID NO: 3521 - DNA, 20 bp, Artificial Sequence
  Synthetic sequence
tggtaatcaatgcaacttgt

SEQ ID NO: 3522 - DNA, 20 bp, Artificial Sequence
  Synthetic sequence
tggtaatcaatgcaacttgt

SEQ ID NO: 3523 - DNA, 20 bp, Artificial Sequence
  Synthetic sequence
tggtaatcaatgcaacttgt

SEQ ID NO: 3524 - DNA, 20 bp, Artificial Sequence
  Synthetic sequence
tggtaatcaatgcaacttgt

SEQ ID NO: 3525 - DNA, 19 bp, Artificial Sequence
  Synthetic sequence
tggtaatcaatgcaacttg

SEQ ID NO: 3526 - DNA, 19 bp, Artificial Sequence
  Synthetic sequence
tggtaatcaatgcaacttg

SEQ ID NO: 3527 - DNA, 19 bp, Artificial Sequence
  Synthetic sequence
tggtaatcaatgcaacttg

SEQ ID NO: 3528 - DNA, 19 bp, Artificial Sequence
  Synthetic sequence
tggtaatcaatgcaacttg

SEQ ID NO: 3529 - DNA, 19 bp, Artificial Sequence
  Synthetic sequence
tggtaatcaatgcaacttg

SEQ ID NO: 3530 - DNA, 19 bp, Artificial Sequence
  Synthetic sequence
ggtaatcaatgcaacttgt

SEQ ID NO: 3531 - DNA, 19 bp, Artificial Sequence
  Synthetic sequence
ggtaatcaatgcaacttgt

SEQ ID NO: 3532 - DNA, 19 bp, Artificial Sequence
  Synthetic sequence
ggtaatcaatgcaacttgt

SEQ ID NO: 3533 - DNA, 19 bp, Artificial Sequence
  Synthetic sequence
ggtaatcaatgcaacttgt

SEQ ID NO: 3534 - DNA, 19 bp, Artificial Sequence
  Synthetic sequence
ggtaatcaatgcaacttgt

SEQ ID NO: 3535 - DNA, 20 bp, Artificial Sequence
  Synthetic sequence
tggtaatcaatgcaacttgt

SEQ ID NO: 3536 - DNA, 20 bp, Artificial Sequence
  Synthetic sequence
tggtaatcaatgcaacttgt

SEQ ID NO: 3537 - DNA, 20 bp, Artificial Sequence
  Synthetic sequence
tggtaatcaatgcaacttgt

SEQ ID NO: 3538 - DNA, 20 bp, Artificial Sequence
  Synthetic sequence
tggtaatcaatgcaacttgt

SEQ ID NO: 3539 - DNA, 20 bp, Artificial Sequence
  Synthetic sequence
tggtaatcaatgcaacttgt

SEQ ID NO: 3540 - DNA, 20 bp, Artificial Sequence
  Synthetic sequence
tggtaatcaatgcaacttgt

SEQ ID NO: 3541 - DNA, 20 bp, Artificial Sequence
  Synthetic sequence
tggtaatcaatgcaacttgt

SEQ ID NO: 3542 - DNA, 20 bp, Artificial Sequence
  Synthetic sequence
tggtaatcaatgcaacttgt

SEQ ID NO: 3543 - DNA, 19 bp, Artificial Sequence
  Synthetic sequence
tggtaatcaatgcaacttg

SEQ ID NO: 3544 - DNA, 19 bp, Artificial Sequence
  Synthetic sequence
tggtaatcaatgcaacttg

SEQ ID NO: 3545 - DNA, 19 bp, Artificial Sequence
  Synthetic sequence
tggtaatcaatgcaacttg

SEQ ID NO: 3546 - DNA, 19 bp, Artificial Sequence
  Synthetic sequence
tggtaatcaatgcaacttg

SEQ ID NO: 3547 - DNA, 20 bp, Artificial Sequence
  Synthetic sequence
tggtaatcaatgcaacttgt

SEQ ID NO: 3548 - DNA, 20 bp, Artificial Sequence
  Synthetic sequence
tggtaatcaatgcaacttgt

SEQ ID NO: 3549 - DNA, 20 bp, Artificial Sequence
  Synthetic sequence
tggtaatcaatgcaacttgt

SEQ ID NO: 3550 - DNA, 18 bp, Artificial Sequence
  Synthetic sequence
tggtaatcaatgcaactt

SEQ ID NO: 3551 - DNA, 18 bp, Artificial Sequence
  Synthetic sequence
tggtaatcaatgcaactt

SEQ ID NO: 3552 - DNA, 18 bp, Artificial Sequence
  Synthetic sequence
tggtaatcaatgcaactt

SEQ ID NO: 3553 - DNA, 18 bp, Artificial Sequence
  Synthetic sequence
tggtaatcaatgcaactt

SEQ ID NO: 3554 - DNA, 18 bp, Artificial Sequence
  Synthetic sequence
gtaatcaatgcaacttgt

SEQ ID NO: 3555 - DNA, 18 bp, Artificial Sequence
  Synthetic sequence
gtaatcaatgcaacttgt

SEQ ID NO: 3556 - DNA, 18 bp, Artificial Sequence
  Synthetic sequence
gtaatcaatgcaacttgt

SEQ ID NO: 3557 - DNA, 18 bp, Artificial Sequence
  Synthetic sequence
gtaatcaatgcaacttgt

SEQ ID NO: 3558 - DNA, 20 bp, Artificial Sequence
  Synthetic sequence
tggtaatcaatgcaacttgt

SEQ ID NO: 3559 - DNA, 20 bp, Artificial Sequence
  Synthetic sequence
tggtaatcaatgcaacttgt

SEQ ID NO: 3560 - DNA, 20 bp, Artificial Sequence
  Synthetic sequence
tggtaatcaatgcaacttgt

SEQ ID NO: 3561 - DNA, 20 bp, Artificial Sequence
  Synthetic sequence
tggtaatcaatgcaacttgt

SEQ ID NO: 3562 - DNA, 20 bp, Artificial Sequence
  Synthetic sequence
tggtaatcaatgcaacttgt

SEQ ID NO: 3563 - DNA, 20 bp, Artificial Sequence
  Synthetic sequence
tggtaatcaatgcaacttgt

SEQ ID NO: 3564 - DNA, 19 bp, Artificial Sequence
  Synthetic sequence
tggtaatcaatgcaacttg

SEQ ID NO: 3565 - DNA, 19 bp, Artificial Sequence
  Synthetic sequence
tggtaatcaatgcaacttg

SEQ ID NO: 3566 - DNA, 19 bp, Artificial Sequence
  Synthetic sequence
tggtaatcaatgcaacttg

SEQ ID NO: 3567 - DNA, 19 bp, Artificial Sequence
  Synthetic sequence
ggtaatcaatgcaacttgt

SEQ ID NO: 3568 - DNA, 19 bp, Artificial Sequence
  Synthetic sequence
ggtaatcaatgcaacttgt

SEQ ID NO: 3569 - DNA, 19 bp, Artificial Sequence
  Synthetic sequence
ggtaatcaatgcaacttgt

SEQ ID NO: 3570 - DNA, 18 bp, Artificial Sequence
  Synthetic sequence
tggtaatcaatgcaactt

SEQ ID NO: 3571 - DNA, 18 bp, Artificial Sequence
  Synthetic sequence
tggtaatcaatgcaactt

SEQ ID NO: 3572 - DNA, 18 bp, Artificial Sequence
  Synthetic sequence
tggtaatcaatgcaactt

SEQ ID NO: 3573 - DNA, 18 bp, Artificial Sequence
  Synthetic sequence
gtaatcaatgcaacttgt

SEQ ID NO: 3574 - DNA, 18 bp, Artificial Sequence
  Synthetic sequence
gtaatcaatgcaacttgt

SEQ ID NO: 3575 - DNA, 18 bp, Artificial Sequence
  Synthetic sequence
gtaatcaatgcaacttgt

SEQ ID NO: 3576 - DNA, 17 bp, Artificial Sequence
  Synthetic sequence
tggtaatcaatgcaact

SEQ ID NO: 3577 - DNA, 17 bp, Artificial Sequence
  Synthetic sequence
tggtaatcaatgcaact

SEQ ID NO: 3578 - DNA, 17 bp, Artificial Sequence
  Synthetic sequence
tggtaatcaatgcaact

SEQ ID NO: 3579 - DNA, 17 bp, Artificial Sequence
  Synthetic sequence
taatcaatgcaacttgt

SEQ ID NO: 3580 - DNA, 17 bp, Artificial Sequence
  Synthetic sequence
taatcaatgcaacttgt

SEQ ID NO: 3581 - DNA, 17 bp, Artificial Sequence
  Synthetic sequence
taatcaatgcaacttgt

SEQ ID NO: 3582 - DNA, 19 bp, Artificial Sequence
  Synthetic sequence
ggtaatcaatgcaacttgt

SEQ ID NO: 3583 - DNA, 19 bp, Artificial Sequence
  Synthetic sequence
ggtaatcaatgcaacttgt

SEQ ID NO: 3584 - DNA, 19 bp, Artificial Sequence
  Synthetic sequence
tggtaatcaatgcaacttg

SEQ ID NO: 3585 - DNA, 19 bp, Artificial Sequence
  Synthetic sequence
tggtaatcaatgcaacttg

SEQ ID NO: 3586 - DNA, 18 bp, Artificial Sequence
  Synthetic sequence
ggtaatcaatgcaacttg

SEQ ID NO: 3587 - DNA, 18 bp, Artificial Sequence
  Synthetic sequence
ggtaatcaatgcaacttg

SEQ ID NO: 3588 - DNA, 18 bp, Artificial Sequence
  Synthetic sequence
ggtaatcaatgcaacttg

SEQ ID NO: 3589 - DNA, 18 bp, Artificial Sequence
  Synthetic sequence
ggtaatcaatgcaacttg

SEQ ID NO: 3590 - DNA, 17 bp, Artificial Sequence
  Synthetic sequence
ggtaatcaatgcaactt

SEQ ID NO: 3591 - DNA, 17 bp, Artificial Sequence
  Synthetic sequence
ggtaatcaatgcaactt

SEQ ID NO: 3592 - DNA, 17 bp, Artificial Sequence
  Synthetic sequence
ggtaatcaatgcaactt

SEQ ID NO: 3593 - DNA, 20 bp, Artificial Sequence
  Synthetic sequence
tggtaatcaatgcaacttgt

SEQ ID NO: 3594 - DNA, 20 bp, Artificial Sequence
  Synthetic sequence
tggtaatcaatgcaacttgt

SEQ ID NO: 3595 - DNA, 20 bp, Artificial Sequence
  Synthetic sequence
tggtaatcaatgcaacttgt

SEQ ID NO: 3596 - DNA, 20 bp, Artificial Sequence
  Synthetic sequence
tggtaatcaatgcaacttgt

SEQ ID NO: 3597 - DNA, 19 bp, Artificial Sequence
  Synthetic sequence
tggtaatcaatgcaacttg

SEQ ID NO: 3598 - DNA, 19 bp, Artificial Sequence
  Synthetic sequence
ggtaatcaatgcaacttgt

SEQ ID NO: 3599 - DNA, 20 bp, Artificial Sequence
  Synthetic sequence
tggtaatcaatgcaacttgt

SEQ ID NO: 3600 - DNA, 20 bp, Artificial Sequence
  Synthetic sequence
tggtaatcaatgcaacttgt

SEQ ID NO: 3601 - DNA, 19 bp, Artificial Sequence
  Synthetic sequence
tggtaatcaatgcaacttg

SEQ ID NO: 3602 - DNA, 20 bp, Artificial Sequence
  Synthetic sequence
tggtaatcaatgcaacttgt

SEQ ID NO: 3603 - DNA, 18 bp, Artificial Sequence
  Synthetic sequence
tggtaatcaatgcaactt

SEQ ID NO: 3604 - DNA, 18 bp, Artificial Sequence
  Synthetic sequence
gtaatcaatgcaacttgt

SEQ ID NO: 3605 - DNA, 20 bp, Artificial Sequence
  Synthetic sequence
tggtaatcaatgcaacttgt

SEQ ID NO: 3606 - DNA, 19 bp, Artificial Sequence
  Synthetic sequence
tggtaatcaatgcaacttg

SEQ ID NO: 3607 - DNA, 18 bp, Artificial Sequence
  Synthetic sequence
tggtaatcaatgcaactt

SEQ ID NO: 3608 - DNA, 18 bp, Artificial Sequence
  Synthetic sequence
gtaatcaatgcaacttgt

SEQ ID NO: 3609 - DNA, 17 bp, Artificial Sequence
  Synthetic sequence
tggtaatcaatgcaact

SEQ ID NO: 3610 - DNA, 17 bp, Artificial Sequence
  Synthetic sequence
taatcaatgcaacttgt

SEQ ID NO: 3611 - DNA, 19 bp, Artificial Sequence
  Synthetic sequence
ggtaatcaatgcaacttgt

SEQ ID NO: 3612 - DNA, 18 bp, Artificial Sequence
  Synthetic sequence
ggtaatcaatgcaacttg

SEQ ID NO: 3613 - DNA, 17 bp, Artificial Sequence
  Synthetic sequence
ggtaatcaatgcaactt

SEQ ID NO: 3614 - DNA, 20 bp, Artificial Sequence
  Synthetic sequence
tggtaatcaatgcaacttgt

SEQ ID NO: 3615 - DNA, 20 bp, Artificial Sequence
  Synthetic sequence
tggtaatcaatgcaacttgt

SEQ ID NO: 3616 - DNA, 20 bp, Artificial Sequence
  Synthetic sequence
tggtaatcaatgcaacttgt

SEQ ID NO: 3617 - DNA, 20 bp, Artificial Sequence
  Synthetic sequence
tggtaatcaatgcaacttgt

SEQ ID NO: 3618 - DNA, 20 bp, Artificial Sequence
  Synthetic sequence
tggtaatcaatgcaacttgt

SEQ ID NO: 3619 - DNA, 20 bp, Artificial Sequence
  Synthetic sequence
tggtaatcaatgcaacttgt

SEQ ID NO: 3620 - DNA, 20 bp, Artificial Sequence
  Synthetic sequence
tggtaatcaatgcaacttgt

SEQ ID NO: 3621 - DNA, 20 bp, Artificial Sequence
  Synthetic sequence
tggtaatcaatgcaacttgt

SEQ ID NO: 3622 - DNA, 20 bp, Artificial Sequence
  Synthetic sequence
tggtaatcaatgcaacttgt

SEQ ID NO: 3623 - DNA, 20 bp, Artificial Sequence
  Synthetic sequence
tggtaatcaatgcaacttgt

SEQ ID NO: 3624 - DNA, 20 bp, Artificial Sequence
  Synthetic sequence
tggtaatcaatgcaacttgt

SEQ ID NO: 3625 - DNA, 20 bp, Artificial Sequence
  Synthetic sequence
tggtaatcaatgcaacttgt

SEQ ID NO: 3626 - DNA, 20 bp, Artificial Sequence
  Synthetic sequence
tggtaatcaatgcaacttgt

SEQ ID NO: 3627 - DNA, 20 bp, Artificial Sequence
  Synthetic sequence
tggtaatcaatgcaacttgt

SEQ ID NO: 3628 - DNA, 20 bp, Artificial Sequence
  Synthetic sequence
tggtaatcaatgcaacttgt

SEQ ID NO: 3629 - DNA, 21 bp, Artificial Sequence
  Synthetic sequence
tggtaatcaatgcaacttgtt

SEQ ID NO: 3630 - DNA, 21 bp, Artificial Sequence
  Synthetic sequence
tggtaatcaatgcaacttgtt

SEQ ID NO: 3631 - DNA, 21 bp, Artificial Sequence
  Synthetic sequence
tggtaatcaatgcaacttgtt

SEQ ID NO: 3632 - DNA, 21 bp, Artificial Sequence
  Synthetic sequence
tggtaatcaatgcaacttgtt

SEQ ID NO: 3633 - DNA, 21 bp, Artificial Sequence
  Synthetic sequence
tggtaatcaatgcaacttgtt

SEQ ID NO: 3634 - DNA, 21 bp, Artificial Sequence
  Synthetic sequence
tggtaatcaatgcaacttgtt

SEQ ID NO: 3635 - DNA, 21 bp, Artificial Sequence
  Synthetic sequence
tggtaatcaatgcaacttgtt

SEQ ID NO: 3636 - DNA, 21 bp, Artificial Sequence
  Synthetic sequence
tggtaatcaatgcaacttgtt

SEQ ID NO: 3637 - DNA, 21 bp, Artificial Sequence
  Synthetic sequence
tggtaatcaatgcaacttgtt

SEQ ID NO: 3638 - DNA, 21 bp, Artificial Sequence
  Synthetic sequence
tggtaatcaatgcaacttgtt

SEQ ID NO: 3639 - DNA, 21 bp, Artificial Sequence
  Synthetic sequence
tggtaatcaatgcaacttgtt

SEQ ID NO: 3640 - DNA, 21 bp, Artificial Sequence
  Synthetic sequence
tggtaatcaatgcaacttgtt

SEQ ID NO: 3641 - DNA, 21 bp, Artificial Sequence
  Synthetic sequence
tggtaatcaatgcaacttgtt

SEQ ID NO: 3642 - DNA, 21 bp, Artificial Sequence
  Synthetic sequence
tggtaatcaatgcaacttgtt

SEQ ID NO: 3643 - DNA, 21 bp, Artificial Sequence
  Synthetic sequence
tggtaatcaatgcaacttgtt

SEQ ID NO: 3644 - DNA, 21 bp, Artificial Sequence
  Synthetic sequence
tggtaatcaatgcaacttgtt

SEQ ID NO: 3645 - DNA, 22 bp, Artificial Sequence
  Synthetic sequence
tggtaatcaatgcaacttgttt

SEQ ID NO: 3646 - DNA, 22 bp, Artificial Sequence
  Synthetic sequence
tggtaatcaatgcaacttgttt

SEQ ID NO: 3647 - DNA, 22 bp, Artificial Sequence
  Synthetic sequence
tggtaatcaatgcaacttgttt

SEQ ID NO: 3648 - DNA, 22 bp, Artificial Sequence
  Synthetic sequence
tggtaatcaatgcaacttgttt

SEQ ID NO: 3649 - DNA, 22 bp, Artificial Sequence
  Synthetic sequence
tggtaatcaatgcaacttgttt

SEQ ID NO: 3650 - DNA, 22 bp, Artificial Sequence
  Synthetic sequence
tggtaatcaatgcaacttgttt

SEQ ID NO: 3651 - DNA, 22 bp, Artificial Sequence
  Synthetic sequence
tggtaatcaatgcaacttgttt

SEQ ID NO: 3652 - DNA, 22 bp, Artificial Sequence
  Synthetic sequence
tggtaatcaatgcaacttgttt

SEQ ID NO: 3653 - DNA, 22 bp, Artificial Sequence
  Synthetic sequence
tggtaatcaatgcaacttgttt

SEQ ID NO: 3654 - DNA, 22 bp, Artificial Sequence
  Synthetic sequence
tggtaatcaatgcaacttgttt

SEQ ID NO: 3655 - DNA, 22 bp, Artificial Sequence
  Synthetic sequence
tggtaatcaatgcaacttgttt

SEQ ID NO: 3656 - DNA, 22 bp, Artificial Sequence
  Synthetic sequence
tggtaatcaatgcaacttgttt

SEQ ID NO: 3657 - DNA, 22 bp, Artificial Sequence
  Synthetic sequence
tggtaatcaatgcaacttgttt

SEQ ID NO: 3658 - DNA, 22 bp, Artificial Sequence
  Synthetic sequence
tggtaatcaatgcaacttgttt

SEQ ID NO: 3659 - DNA, 22 bp, Artificial Sequence
  Synthetic sequence
tggtaatcaatgcaacttgttt

SEQ ID NO: 3660 - DNA, 22 bp, Artificial Sequence
  Synthetic sequence
tggtaatcaatgcaacttgttt

SEQ ID NO: 3661 - DNA, 23 bp, Artificial Sequence
  Synthetic sequence
tggtaatcaatgcaacttgtttt

SEQ ID NO: 3662 - DNA, 23 bp, Artificial Sequence
  Synthetic sequence
tggtaatcaatgcaacttgtttt

SEQ ID NO: 3663 - DNA, 23 bp, Artificial Sequence
  Synthetic sequence
tggtaatcaatgcaacttgtttt

SEQ ID NO: 3664 - DNA, 23 bp, Artificial Sequence
  Synthetic sequence
tggtaatcaatgcaacttgtttt

SEQ ID NO: 3665 - DNA, 23 bp, Artificial Sequence
  Synthetic sequence
tggtaatcaatgcaacttgtttt

SEQ ID NO: 3666 - DNA, 23 bp, Artificial Sequence
  Synthetic sequence
tggtaatcaatgcaacttgtttt

SEQ ID NO: 3667 - DNA, 23 bp, Artificial Sequence
  Synthetic sequence
tggtaatcaatgcaacttgtttt

SEQ ID NO: 3668 - DNA, 23 bp, Artificial Sequence
  Synthetic sequence
tggtaatcaatgcaacttgtttt

SEQ ID NO: 3669 - DNA, 23 bp, Artificial Sequence
  Synthetic sequence
tggtaatcaatgcaacttgtttt

SEQ ID NO: 3670 - DNA, 23 bp, Artificial Sequence
  Synthetic sequence
tggtaatcaatgcaacttgtttt

SEQ ID NO: 3671 - DNA, 23 bp, Artificial Sequence
  Synthetic sequence
tggtaatcaatgcaacttgtttt

SEQ ID NO: 3672 - DNA, 23 bp, Artificial Sequence
  Synthetic sequence
tggtaatcaatgcaacttgtttt

SEQ ID NO: 3673 - DNA, 23 bp, Artificial Sequence
  Synthetic sequence
tggtaatcaatgcaacttgtttt

SEQ ID NO: 3674 - DNA, 23 bp, Artificial Sequence
  Synthetic sequence
tggtaatcaatgcaacttgtttt

SEQ ID NO: 3675 - DNA, 23 bp, Artificial Sequence
  Synthetic sequence
tggtaatcaatgcaacttgtttt

SEQ ID NO: 3676 - DNA, 23 bp, Artificial Sequence
  Synthetic sequence
tggtaatcaatgcaacttgtttt

SEQ ID NO: 3677 - DNA, 21 bp, Artificial Sequence
  Synthetic sequence
tggtaatcaatgcaacttgtt

SEQ ID NO: 3678 - DNA, 21 bp, Artificial Sequence
  Synthetic sequence
tggtaatcaatgcaacttgtt

SEQ ID NO: 3679 - DNA, 21 bp, Artificial Sequence
  Synthetic sequence
tggtaatcaatgcaacttgtt

SEQ ID NO: 3680 - DNA, 21 bp, Artificial Sequence
  Synthetic sequence
tggtaatcaatgcaacttgtt

SEQ ID NO: 3681 - DNA, 21 bp, Artificial Sequence
  Synthetic sequence
tggtaatcaatgcaacttgtt

SEQ ID NO: 3682 - DNA, 21 bp, Artificial Sequence
  Synthetic sequence
tggtaatcaatgcaacttgtt

SEQ ID NO: 3683 - DNA, 21 bp, Artificial Sequence
  Synthetic sequence
tggtaatcaatgcaacttgtt

SEQ ID NO: 3684 - DNA, 21 bp, Artificial Sequence
  Synthetic sequence
tggtaatcaatgcaacttgtt

SEQ ID NO: 3685 - DNA, 21 bp, Artificial Sequence
  Synthetic sequence
tggtaatcaatgcaacttgtt

SEQ ID NO: 3686 - DNA, 21 bp, Artificial Sequence
  Synthetic sequence
tggtaatcaatgcaacttgtt

SEQ ID NO: 3687 - DNA, 21 bp, Artificial Sequence
  Synthetic sequence
tggtaatcaatgcaacttgtt

SEQ ID NO: 3688 - DNA, 21 bp, Artificial Sequence
  Synthetic sequence
tggtaatcaatgcaacttgtt

SEQ ID NO: 3689 - DNA, 21 bp, Artificial Sequence
  Synthetic sequence
tggtaatcaatgcaacttgtt

SEQ ID NO: 3690 - DNA, 21 bp, Artificial Sequence
  Synthetic sequence
tggtaatcaatgcaacttgtt

SEQ ID NO: 3691 - DNA, 21 bp, Artificial Sequence
  Synthetic sequence
tggtaatcaatgcaacttgtt

SEQ ID NO: 3692 - DNA, 21 bp, Artificial Sequence
  Synthetic sequence
tggtaatcaatgcaacttgtt

SEQ ID NO: 3693 - DNA, 22 bp, Artificial Sequence
  Synthetic sequence
tggtaatcaatgcaacttgttt

SEQ ID NO: 3694 - DNA, 22 bp, Artificial Sequence
  Synthetic sequence
tggtaatcaatgcaacttgttt

SEQ ID NO: 3695 - DNA, 22 bp, Artificial Sequence
  Synthetic sequence
tggtaatcaatgcaacttgttt

SEQ ID NO: 3696 - DNA, 22 bp, Artificial Sequence
  Synthetic sequence
tggtaatcaatgcaacttgttt

SEQ ID NO: 3697 - DNA, 22 bp, Artificial Sequence
  Synthetic sequence
tggtaatcaatgcaacttgttt

SEQ ID NO: 3698 - DNA, 22 bp, Artificial Sequence
  Synthetic sequence
tggtaatcaatgcaacttgttt

SEQ ID NO: 3699 - DNA, 22 bp, Artificial Sequence
  Synthetic sequence
tggtaatcaatgcaacttgttt

SEQ ID NO: 3700 - DNA, 22 bp, Artificial Sequence
  Synthetic sequence
tggtaatcaatgcaacttgttt

SEQ ID NO: 3701 - DNA, 22 bp, Artificial Sequence
  Synthetic sequence
tggtaatcaatgcaacttgttt

SEQ ID NO: 3702 - DNA, 22 bp, Artificial Sequence
  Synthetic sequence
tggtaatcaatgcaacttgttt

SEQ ID NO: 3703 - DNA, 22 bp, Artificial Sequence
  Synthetic sequence
tggtaatcaatgcaacttgttt

SEQ ID NO: 3704 - DNA, 22 bp, Artificial Sequence
  Synthetic sequence
tggtaatcaatgcaacttgttt

SEQ ID NO: 3705 - DNA, 22 bp, Artificial Sequence
  Synthetic sequence
tggtaatcaatgcaacttgttt

SEQ ID NO: 3706 - DNA, 22 bp, Artificial Sequence
  Synthetic sequence
tggtaatcaatgcaacttgttt

SEQ ID NO: 3707 - DNA, 22 bp, Artificial Sequence
  Synthetic sequence
tggtaatcaatgcaacttgttt

SEQ ID NO: 3708 - DNA, 22 bp, Artificial Sequence
  Synthetic sequence
tggtaatcaatgcaacttgttt

SEQ ID NO: 3709 - DNA, 20 bp, Artificial Sequence
  Synthetic sequence
agccaatctgagccatgatg

SEQ ID NO: 3710 - DNA, 20 bp, Artificial Sequence
  Synthetic sequence
agccaatctgagccatgatg

SEQ ID NO: 3711 - DNA, 20 bp, Artificial Sequence
  Synthetic sequence
agccaatctgagccatgatg

SEQ ID NO: 3712 - DNA, 20 bp, Artificial Sequence
  Synthetic sequence
agccaatctgagccatgatg

SEQ ID NO: 3713 - DNA, 20 bp, Artificial Sequence
  Synthetic sequence
agccaatctgagccatgatg

SEQ ID NO: 3714 - DNA, 20 bp, Artificial Sequence
  Synthetic sequence
agccaatctgagccatgatg

SEQ ID NO: 3715 - DNA, 20 bp, Artificial Sequence
  Synthetic sequence
agccaatctgagccatgatg

SEQ ID NO: 3716 - DNA, 20 bp, Artificial Sequence
  Synthetic sequence
agccaatctgagccatgatg

SEQ ID NO: 3717 - DNA, 20 bp, Artificial Sequence
  Synthetic sequence
agccaatctgagccatgatg

SEQ ID NO: 3718 - DNA, 20 bp, Artificial Sequence
  Synthetic sequence
agccaatctgagccatgatg

SEQ ID NO: 3719 - DNA, 20 bp, Artificial Sequence
  Synthetic sequence
agccaatctgagccatgatg

SEQ ID NO: 3720 - DNA, 20 bp, Artificial Sequence
  Synthetic sequence
agccaatctgagccatgatg

SEQ ID NO: 3721 - DNA, 20 bp, Artificial Sequence
  Synthetic sequence
agccaatctgagccatgatg

SEQ ID NO: 3722 - DNA, 20 bp, Artificial Sequence
  Synthetic sequence
agccaatctgagccatgatg

SEQ ID NO: 3723 - DNA, 20 bp, Artificial Sequence
  Synthetic sequence
agccaatctgagccatgatg

SEQ ID NO: 3724 - DNA, 20 bp, Artificial Sequence
  Synthetic sequence
agccaatctgagccatgatg

SEQ ID NO: 3725 - DNA, 20 bp, Artificial Sequence
  Synthetic sequence
agccaatctgagccatgatg

SEQ ID NO: 3726 - DNA, 20 bp, Artificial Sequence
  Synthetic sequence
agccaatctgagccatgatg

SEQ ID NO: 3727 - DNA, 20 bp, Artificial Sequence
  Synthetic sequence
agccaatctgagccatgatg

SEQ ID NO: 3728 - DNA, 20 bp, Artificial Sequence
  Synthetic sequence
agccaatctgagccatgatg

SEQ ID NO: 3729 - DNA, 20 bp, Artificial Sequence
  Synthetic sequence
agccaatctgagccatgatg

SEQ ID NO: 3730 - DNA, 20 bp, Artificial Sequence
  Synthetic sequence
agccaatctgagccatgatg

SEQ ID NO: 3731 - DNA, 19 bp, Artificial Sequence
  Synthetic sequence
agccaatctgagccatgat

SEQ ID NO: 3732 - DNA, 19 bp, Artificial Sequence
  Synthetic sequence
agccaatctgagccatgat

SEQ ID NO: 3733 - DNA, 19 bp, Artificial Sequence
  Synthetic sequence
agccaatctgagccatgat

SEQ ID NO: 3734 - DNA, 19 bp, Artificial Sequence
  Synthetic sequence
agccaatctgagccatgat

SEQ ID NO: 3735 - DNA, 19 bp, Artificial Sequence
  Synthetic sequence
agccaatctgagccatgat

SEQ ID NO: 3736 - DNA, 19 bp, Artificial Sequence
  Synthetic sequence
gccaatctgagccatgatg

SEQ ID NO: 3737 - DNA, 19 bp, Artificial Sequence
  Synthetic sequence
gccaatctgagccatgatg

SEQ ID NO: 3738 - DNA, 19 bp, Artificial Sequence
  Synthetic sequence
gccaatctgagccatgatg

SEQ ID NO: 3739 - DNA, 19 bp, Artificial Sequence
  Synthetic sequence
gccaatctgagccatgatg

SEQ ID NO: 3740 - DNA, 19 bp, Artificial Sequence
  Synthetic sequence
gccaatctgagccatgatg

SEQ ID NO: 3741 - DNA, 20 bp, Artificial Sequence
  Synthetic sequence
agccaatctgagccatgatg

SEQ ID NO: 3742 - DNA, 20 bp, Artificial Sequence
  Synthetic sequence
agccaatctgagccatgatg

SEQ ID NO: 3743 - DNA, 20 bp, Artificial Sequence
  Synthetic sequence
agccaatctgagccatgatg

SEQ ID NO: 3744 - DNA, 20 bp, Artificial Sequence
  Synthetic sequence
agccaatctgagccatgatg

SEQ ID NO: 3745 - DNA, 20 bp, Artificial Sequence
  Synthetic sequence
agccaatctgagccatgatg

SEQ ID NO: 3746 - DNA, 20 bp, Artificial Sequence
  Synthetic sequence
agccaatctgagccatgatg

SEQ ID NO: 3747 - DNA, 20 bp, Artificial Sequence
  Synthetic sequence
agccaatctgagccatgatg

SEQ ID NO: 3748 - DNA, 20 bp, Artificial Sequence
  Synthetic sequence
agccaatctgagccatgatg

SEQ ID NO: 3749 - DNA, 19 bp, Artificial Sequence
  Synthetic sequence
agccaatctgagccatgat

SEQ ID NO: 3750 - DNA, 19 bp, Artificial Sequence
  Synthetic sequence
agccaatctgagccatgat

SEQ ID NO: 3751 - DNA, 19 bp, Artificial Sequence
  Synthetic sequence
agccaatctgagccatgat

SEQ ID NO: 3752 - DNA, 19 bp, Artificial Sequence
  Synthetic sequence
agccaatctgagccatgat

SEQ ID NO: 3753 - DNA, 20 bp, Artificial Sequence
  Synthetic sequence
agccaatctgagccatgatg

SEQ ID NO: 3754 - DNA, 20 bp, Artificial Sequence
  Synthetic sequence
agccaatctgagccatgatg

SEQ ID NO: 3755 - DNA, 20 bp, Artificial Sequence
  Synthetic sequence
agccaatctgagccatgatg

SEQ ID NO: 3756 - DNA, 18 bp, Artificial Sequence
  Synthetic sequence
agccaatctgagccatga

SEQ ID NO: 3757 - DNA, 18 bp, Artificial Sequence
  Synthetic sequence
agccaatctgagccatga

SEQ ID NO: 3758 - DNA, 18 bp, Artificial Sequence
  Synthetic sequence
agccaatctgagccatga

SEQ ID NO: 3759 - DNA, 18 bp, Artificial Sequence
  Synthetic sequence
agccaatctgagccatga

SEQ ID NO: 3760 - DNA, 18 bp, Artificial Sequence
  Synthetic sequence
ccaatctgagccatgatg

SEQ ID NO: 3761 - DNA, 18 bp, Artificial Sequence
  Synthetic sequence
ccaatctgagccatgatg

SEQ ID NO: 3762 - DNA, 18 bp, Artificial Sequence
  Synthetic sequence
ccaatctgagccatgatg

SEQ ID NO: 3763 - DNA, 18 bp, Artificial Sequence
  Synthetic sequence
ccaatctgagccatgatg

SEQ ID NO: 3764 - DNA, 20 bp, Artificial Sequence
  Synthetic sequence
agccaatctgagccatgatg

SEQ ID NO: 3765 - DNA, 20 bp, Artificial Sequence
  Synthetic sequence
agccaatctgagccatgatg

SEQ ID NO: 3766 - DNA, 20 bp, Artificial Sequence
  Synthetic sequence
agccaatctgagccatgatg

SEQ ID NO: 3767 - DNA, 20 bp, Artificial Sequence
  Synthetic sequence
agccaatctgagccatgatg

SEQ ID NO: 3768 - DNA, 20 bp, Artificial Sequence
  Synthetic sequence
agccaatctgagccatgatg

SEQ ID NO: 3769 - DNA, 20 bp, Artificial Sequence
  Synthetic sequence
agccaatctgagccatgatg

SEQ ID NO: 3770 - DNA, 19 bp, Artificial Sequence
  Synthetic sequence
agccaatctgagccatgat

SEQ ID NO: 3771 - DNA, 19 bp, Artificial Sequence
  Synthetic sequence
agccaatctgagccatgat

SEQ ID NO: 3772 - DNA, 19 bp, Artificial Sequence
  Synthetic sequence
agccaatctgagccatgat

SEQ ID NO: 3773 - DNA, 19 bp, Artificial Sequence
  Synthetic sequence
gccaatctgagccatgatg

SEQ ID NO: 3774 - DNA, 19 bp, Artificial Sequence
  Synthetic sequence
gccaatctgagccatgatg

SEQ ID NO: 3775 - DNA, 19 bp, Artificial Sequence
  Synthetic sequence
gccaatctgagccatgatg

SEQ ID NO: 3776 - DNA, 18 bp, Artificial Sequence
  Synthetic sequence
agccaatctgagccatga

SEQ ID NO: 3777 - DNA, 18 bp, Artificial Sequence
  Synthetic sequence
agccaatctgagccatga

SEQ ID NO: 3778 - DNA, 18 bp, Artificial Sequence
  Synthetic sequence
agccaatctgagccatga

SEQ ID NO: 3779 - DNA, 18 bp, Artificial Sequence
  Synthetic sequence
ccaatctgagccatgatg

SEQ ID NO: 3780 - DNA, 18 bp, Artificial Sequence
  Synthetic sequence
ccaatctgagccatgatg

SEQ ID NO: 3781 - DNA, 18 bp, Artificial Sequence
  Synthetic sequence
ccaatctgagccatgatg

SEQ ID NO: 3782 - DNA, 17 bp, Artificial Sequence
  Synthetic sequence
agccaatctgagccatg

SEQ ID NO: 3783 - DNA, 17 bp, Artificial Sequence
  Synthetic sequence
agccaatctgagccatg

SEQ ID NO: 3784 - DNA, 17 bp, Artificial Sequence
  Synthetic sequence
agccaatctgagccatg

SEQ ID NO: 3785 - DNA, 17 bp, Artificial Sequence
  Synthetic sequence
caatctgagccatgatg

SEQ ID NO: 3786 - DNA, 17 bp, Artificial Sequence
  Synthetic sequence
caatctgagccatgatg

SEQ ID NO: 3787 - DNA, 17 bp, Artificial Sequence
  Synthetic sequence
caatctgagccatgatg

SEQ ID NO: 3788 - DNA, 19 bp, Artificial Sequence
  Synthetic sequence
gccaatctgagccatgatg

SEQ ID NO: 3789 - DNA, 19 bp, Artificial Sequence
  Synthetic sequence
gccaatctgagccatgatg

SEQ ID NO: 3790 - DNA, 19 bp, Artificial Sequence
  Synthetic sequence
agccaatctgagccatgat

SEQ ID NO: 3791 - DNA, 19 bp, Artificial Sequence
  Synthetic sequence
agccaatctgagccatgat

SEQ ID NO: 3792 - DNA, 18 bp, Artificial Sequence
  Synthetic sequence
gccaatctgagccatgat

SEQ ID NO: 3793 - DNA, 18 bp, Artificial Sequence
  Synthetic sequence
gccaatctgagccatgat

SEQ ID NO: 3794 - DNA, 18 bp, Artificial Sequence
  Synthetic sequence
gccaatctgagccatgat

SEQ ID NO: 3795 - DNA, 18 bp, Artificial Sequence
  Synthetic sequence
gccaatctgagccatgat

SEQ ID NO: 3796 - DNA, 17 bp, Artificial Sequence
  Synthetic sequence
gccaatctgagccatga

SEQ ID NO: 3797 - DNA, 17 bp, Artificial Sequence
  Synthetic sequence
gccaatctgagccatga

SEQ ID NO: 3798 - DNA, 17 bp, Artificial Sequence
  Synthetic sequence
gccaatctgagccatga

SEQ ID NO: 3799 - DNA, 20 bp, Artificial Sequence
  Synthetic sequence
agccaatctgagccatgatg

SEQ ID NO: 3800 - DNA, 20 bp, Artificial Sequence
  Synthetic sequence
agccaatctgagccatgatg

SEQ ID NO: 3801 - DNA, 20 bp, Artificial Sequence
  Synthetic sequence
agccaatctgagccatgatg

SEQ ID NO: 3802 - DNA, 20 bp, Artificial Sequence
  Synthetic sequence
agccaatctgagccatgatg

SEQ ID NO: 3803 - DNA, 19 bp, Artificial Sequence
  Synthetic sequence
agccaatctgagccatgat

SEQ ID NO: 3804 - DNA, 19 bp, Artificial Sequence
  Synthetic sequence
gccaatctgagccatgatg

SEQ ID NO: 3805 - DNA, 20 bp, Artificial Sequence
  Synthetic sequence
agccaatctgagccatgatg

SEQ ID NO: 3806 - DNA, 20 bp, Artificial Sequence
  Synthetic sequence
agccaatctgagccatgatg

SEQ ID NO: 3807 - DNA, 19 bp, Artificial Sequence
  Synthetic sequence
agccaatctgagccatgat

SEQ ID NO: 3808 - DNA, 20 bp, Artificial Sequence
  Synthetic sequence
agccaatctgagccatgatg

SEQ ID NO: 3809 - DNA, 18 bp, Artificial Sequence
  Synthetic sequence
agccaatctgagccatga

SEQ ID NO: 3810 - DNA, 18 bp, Artificial Sequence
  Synthetic sequence
ccaatctgagccatgatg

SEQ ID NO: 3811 - DNA, 20 bp, Artificial Sequence
  Synthetic sequence
agccaatctgagccatgatg

SEQ ID NO: 3812 - DNA, 19 bp, Artificial Sequence
  Synthetic sequence
agccaatctgagccatgat

SEQ ID NO: 3813 - DNA, 18 bp, Artificial Sequence
  Synthetic sequence
agccaatctgagccatga

SEQ ID NO: 3814 - DNA, 18 bp, Artificial Sequence
  Synthetic sequence
ccaatctgagccatgatg

SEQ ID NO: 3815 - DNA, 17 bp, Artificial Sequence
  Synthetic sequence
agccaatctgagccatg

SEQ ID NO: 3816 - DNA, 17 bp, Artificial Sequence
  Synthetic sequence
caatctgagccatgatg

SEQ ID NO: 3817 - DNA, 19 bp, Artificial Sequence
  Synthetic sequence
gccaatctgagccatgatg

SEQ ID NO: 3818 - DNA, 18 bp, Artificial Sequence
  Synthetic sequence
gccaatctgagccatgat

SEQ ID NO: 3819 - DNA, 17 bp, Artificial Sequence
  Synthetic sequence
gccaatctgagccatga

SEQ ID NO: 3820 - DNA, 20 bp, Artificial Sequence
  Synthetic sequence
agccaatctgagccatgatg

SEQ ID NO: 3821 - DNA, 20 bp, Artificial Sequence
  Synthetic sequence
agccaatctgagccatgatg

SEQ ID NO: 3822 - DNA, 20 bp, Artificial Sequence
  Synthetic sequence
agccaatctgagccatgatg

SEQ ID NO: 3823 - DNA, 20 bp, Artificial Sequence
  Synthetic sequence
agccaatctgagccatgatg

SEQ ID NO: 3824 - DNA, 20 bp, Artificial Sequence
  Synthetic sequence
agccaatctgagccatgatg

SEQ ID NO: 3825 - DNA, 20 bp, Artificial Sequence
  Synthetic sequence
agccaatctgagccatgatg

SEQ ID NO: 3826 - DNA, 20 bp, Artificial Sequence
  Synthetic sequence
agccaatctgagccatgatg

SEQ ID NO: 3827 - DNA, 20 bp, Artificial Sequence
  Synthetic sequence
agccaatctgagccatgatg

SEQ ID NO: 3828 - DNA, 20 bp, Artificial Sequence
  Synthetic sequence
agccaatctgagccatgatg

SEQ ID NO: 3829 - DNA, 20 bp, Artificial Sequence
  Synthetic sequence
agccaatctgagccatgatg

SEQ ID NO: 3830 - DNA, 20 bp, Artificial Sequence
  Synthetic sequence
agccaatctgagccatgatg

SEQ ID NO: 3831 - DNA, 20 bp, Artificial Sequence
  Synthetic sequence
agccaatctgagccatgatg

SEQ ID NO: 3832 - DNA, 20 bp, Artificial Sequence
  Synthetic sequence
agccaatctgagccatgatg

SEQ ID NO: 3833 - DNA, 20 bp, Artificial Sequence
  Synthetic sequence
agccaatctgagccatgatg

SEQ ID NO: 3834 - DNA, 20 bp, Artificial Sequence
  Synthetic sequence
agccaatctgagccatgatg

SEQ ID NO: 3835 - DNA, 21 bp, Artificial Sequence
  Synthetic sequence
agccaatctgagccatgatgg

SEQ ID NO: 3836 - DNA, 21 bp, Artificial Sequence
  Synthetic sequence
agccaatctgagccatgatgg

SEQ ID NO: 3837 - DNA, 21 bp, Artificial Sequence
  Synthetic sequence
agccaatctgagccatgatgg

SEQ ID NO: 3838 - DNA, 21 bp, Artificial Sequence
  Synthetic sequence
agccaatctgagccatgatgg

SEQ ID NO: 3839 - DNA, 21 bp, Artificial Sequence
  Synthetic sequence
agccaatctgagccatgatgg

SEQ ID NO: 3840 - DNA, 21 bp, Artificial Sequence
  Synthetic sequence
agccaatctgagccatgatgg

SEQ ID NO: 3841 - DNA, 21 bp, Artificial Sequence
  Synthetic sequence
agccaatctgagccatgatgg

SEQ ID NO: 3842 - DNA, 21 bp, Artificial Sequence
  Synthetic sequence
agccaatctgagccatgatgg

SEQ ID NO: 3843 - DNA, 21 bp, Artificial Sequence
  Synthetic sequence
agccaatctgagccatgatgg

SEQ ID NO: 3844 - DNA, 21 bp, Artificial Sequence
  Synthetic sequence
agccaatctgagccatgatgg

SEQ ID NO: 3845 - DNA, 21 bp, Artificial Sequence
  Synthetic sequence
agccaatctgagccatgatgg

SEQ ID NO: 3846 - DNA, 21 bp, Artificial Sequence
  Synthetic sequence
agccaatctgagccatgatgg

SEQ ID NO: 3847 - DNA, 21 bp, Artificial Sequence
  Synthetic sequence
agccaatctgagccatgatgg

SEQ ID NO: 3848 - DNA, 21 bp, Artificial Sequence
  Synthetic sequence
agccaatctgagccatgatgg

SEQ ID NO: 3849 - DNA, 21 bp, Artificial Sequence
  Synthetic sequence
agccaatctgagccatgatgg

SEQ ID NO: 3850 - DNA, 21 bp, Artificial Sequence
  Synthetic sequence
agccaatctgagccatgatgg

SEQ ID NO: 3851 - DNA, 22 bp, Artificial Sequence
  Synthetic sequence
agccaatctgagccatgatggt

SEQ ID NO: 3852 - DNA, 22 bp, Artificial Sequence
  Synthetic sequence
agccaatctgagccatgatggt

SEQ ID NO: 3853 - DNA, 22 bp, Artificial Sequence
  Synthetic sequence
agccaatctgagccatgatggt

SEQ ID NO: 3854 - DNA, 22 bp, Artificial Sequence
  Synthetic sequence
agccaatctgagccatgatggt

SEQ ID NO: 3855 - DNA, 22 bp, Artificial Sequence
  Synthetic sequence
agccaatctgagccatgatggt

SEQ ID NO: 3856 - DNA, 22 bp, Artificial Sequence
  Synthetic sequence
agccaatctgagccatgatggt

SEQ ID NO: 3857 - DNA, 22 bp, Artificial Sequence
  Synthetic sequence
agccaatctgagccatgatggt

SEQ ID NO: 3858 - DNA, 22 bp, Artificial Sequence
  Synthetic sequence
agccaatctgagccatgatggt

SEQ ID NO: 3859 - DNA, 22 bp, Artificial Sequence
  Synthetic sequence
agccaatctgagccatgatggt

SEQ ID NO: 3860 - DNA, 22 bp, Artificial Sequence
  Synthetic sequence
agccaatctgagccatgatggt

SEQ ID NO: 3861 - DNA, 22 bp, Artificial Sequence
  Synthetic sequence
agccaatctgagccatgatggt

SEQ ID NO: 3862 - DNA, 22 bp, Artificial Sequence
  Synthetic sequence
agccaatctgagccatgatggt

SEQ ID NO: 3863 - DNA, 22 bp, Artificial Sequence
  Synthetic sequence
agccaatctgagccatgatggt

SEQ ID NO: 3864 - DNA, 22 bp, Artificial Sequence
  Synthetic sequence
agccaatctgagccatgatggt

SEQ ID NO: 3865 - DNA, 22 bp, Artificial Sequence
  Synthetic sequence
agccaatctgagccatgatggt

SEQ ID NO: 3866 - DNA, 22 bp, Artificial Sequence
  Synthetic sequence
agccaatctgagccatgatggt

SEQ ID NO: 3867 - DNA, 23 bp, Artificial Sequence
  Synthetic sequence
agccaatctgagccatgatggta

SEQ ID NO: 3868 - DNA, 23 bp, Artificial Sequence
  Synthetic sequence
agccaatctgagccatgatggta

SEQ ID NO: 3869 - DNA, 23 bp, Artificial Sequence
  Synthetic sequence
agccaatctgagccatgatggta

SEQ ID NO: 3870 - DNA, 23 bp, Artificial Sequence
  Synthetic sequence
agccaatctgagccatgatggta

SEQ ID NO: 3871 - DNA, 23 bp, Artificial Sequence
  Synthetic sequence
agccaatctgagccatgatggta

SEQ ID NO: 3872 - DNA, 23 bp, Artificial Sequence
  Synthetic sequence
agccaatctgagccatgatggta

SEQ ID NO: 3873 - DNA, 23 bp, Artificial Sequence
  Synthetic sequence
agccaatctgagccatgatggta

SEQ ID NO: 3874 - DNA, 23 bp, Artificial Sequence
  Synthetic sequence
agccaatctgagccatgatggta

SEQ ID NO: 3875 - DNA, 23 bp, Artificial Sequence
  Synthetic sequence
agccaatctgagccatgatggta

SEQ ID NO: 3876 - DNA, 23 bp, Artificial Sequence
  Synthetic sequence
agccaatctgagccatgatggta

SEQ ID NO: 3877 - DNA, 23 bp, Artificial Sequence
  Synthetic sequence
agccaatctgagccatgatggta

SEQ ID NO: 3878 - DNA, 23 bp, Artificial Sequence
  Synthetic sequence
agccaatctgagccatgatggta

SEQ ID NO: 3879 - DNA, 23 bp, Artificial Sequence
  Synthetic sequence
agccaatctgagccatgatggta

SEQ ID NO: 3880 - DNA, 23 bp, Artificial Sequence
  Synthetic sequence
agccaatctgagccatgatggta

SEQ ID NO: 3881 - DNA, 23 bp, Artificial Sequence
  Synthetic sequence
agccaatctgagccatgatggta

SEQ ID NO: 3882 - DNA, 23 bp, Artificial Sequence
  Synthetic sequence
agccaatctgagccatgatggta

SEQ ID NO: 3883 - DNA, 21 bp, Artificial Sequence
  Synthetic sequence
agccaatctgagccatgatgg

SEQ ID NO: 3884 - DNA, 21 bp, Artificial Sequence
  Synthetic sequence
agccaatctgagccatgatgg

SEQ ID NO: 3885 - DNA, 21 bp, Artificial Sequence
  Synthetic sequence
agccaatctgagccatgatgg

SEQ ID NO: 3886 - DNA, 21 bp, Artificial Sequence
  Synthetic sequence
agccaatctgagccatgatgg

SEQ ID NO: 3887 - DNA, 21 bp, Artificial Sequence
  Synthetic sequence
agccaatctgagccatgatgg

SEQ ID NO: 3888 - DNA, 21 bp, Artificial Sequence
  Synthetic sequence
agccaatctgagccatgatgg

SEQ ID NO: 3889 - DNA, 21 bp, Artificial Sequence
  Synthetic sequence
agccaatctgagccatgatgg

SEQ ID NO: 3890 - DNA, 21 bp, Artificial Sequence
  Synthetic sequence
agccaatctgagccatgatgg

SEQ ID NO: 3891 - DNA, 21 bp, Artificial Sequence
  Synthetic sequence
agccaatctgagccatgatgg

SEQ ID NO: 3892 - DNA, 21 bp, Artificial Sequence
  Synthetic sequence
agccaatctgagccatgatgg

SEQ ID NO: 3893 - DNA, 21 bp, Artificial Sequence
  Synthetic sequence
agccaatctgagccatgatgg

SEQ ID NO: 3894 - DNA, 21 bp, Artificial Sequence
  Synthetic sequence
agccaatctgagccatgatgg

SEQ ID NO: 3895 - DNA, 21 bp, Artificial Sequence
  Synthetic sequence
agccaatctgagccatgatgg

SEQ ID NO: 3896 - DNA, 21 bp, Artificial Sequence
  Synthetic sequence
agccaatctgagccatgatgg

SEQ ID NO: 3897 - DNA, 21 bp, Artificial Sequence
  Synthetic sequence
agccaatctgagccatgatgg

SEQ ID NO: 3898 - DNA, 21 bp, Artificial Sequence
  Synthetic sequence
agccaatctgagccatgatgg

SEQ ID NO: 3899 - DNA, 22 bp, Artificial Sequence
  Synthetic sequence
agccaatctgagccatgatggt

SEQ ID NO: 3900 - DNA, 22 bp, Artificial Sequence
  Synthetic sequence
agccaatctgagccatgatggt

SEQ ID NO: 3901 - DNA, 22 bp, Artificial Sequence
  Synthetic sequence
agccaatctgagccatgatggt

SEQ ID NO: 3902 - DNA, 22 bp, Artificial Sequence
  Synthetic sequence
agccaatctgagccatgatggt

SEQ ID NO: 3903 - DNA, 22 bp, Artificial Sequence
  Synthetic sequence
agccaatctgagccatgatggt

SEQ ID NO: 3904 - DNA, 22 bp, Artificial Sequence
  Synthetic sequence
agccaatctgagccatgatggt

SEQ ID NO: 3905 - DNA, 22 bp, Artificial Sequence
  Synthetic sequence
agccaatctgagccatgatggt

SEQ ID NO: 3906 - DNA, 22 bp, Artificial Sequence
  Synthetic sequence
agccaatctgagccatgatggt

SEQ ID NO: 3907 - DNA, 22 bp, Artificial Sequence
  Synthetic sequence
agccaatctgagccatgatggt

SEQ ID NO: 3908 - DNA, 22 bp, Artificial Sequence
  Synthetic sequence
agccaatctgagccatgatggt

SEQ ID NO: 3909 - DNA, 22 bp, Artificial Sequence
  Synthetic sequence
agccaatctgagccatgatggt

SEQ ID NO: 3910 - DNA, 22 bp, Artificial Sequence
  Synthetic sequence
agccaatctgagccatgatggt

SEQ ID NO: 3911 - DNA, 22 bp, Artificial Sequence
  Synthetic sequence
agccaatctgagccatgatggt

SEQ ID NO: 3912 - DNA, 22 bp, Artificial Sequence
  Synthetic sequence
agccaatctgagccatgatggt

SEQ ID NO: 3913 - DNA, 22 bp, Artificial Sequence
  Synthetic sequence
agccaatctgagccatgatggt

SEQ ID NO: 3914 - DNA, 22 bp, Artificial Sequence
  Synthetic sequence
agccaatctgagccatgatggt

SEQ ID NO: 3915 - DNA, 20 bp, Artificial Sequence
  Synthetic sequence
gagccaatctgagccatgat

SEQ ID NO: 3916 - DNA, 20 bp, Artificial Sequence
  Synthetic sequence
gagccaatctgagccatgat

SEQ ID NO: 3917 - DNA, 20 bp, Artificial Sequence
  Synthetic sequence
gagccaatctgagccatgat

SEQ ID NO: 3918 - DNA, 20 bp, Artificial Sequence
  Synthetic sequence
gagccaatctgagccatgat

SEQ ID NO: 3919 - DNA, 20 bp, Artificial Sequence
  Synthetic sequence
gagccaatctgagccatgat

SEQ ID NO: 3920 - DNA, 20 bp, Artificial Sequence
  Synthetic sequence
gagccaatctgagccatgat

SEQ ID NO: 3921 - DNA, 20 bp, Artificial Sequence
  Synthetic sequence
gagccaatctgagccatgat

SEQ ID NO: 3922 - DNA, 20 bp, Artificial Sequence
  Synthetic sequence
gagccaatctgagccatgat

SEQ ID NO: 3923 - DNA, 20 bp, Artificial Sequence
  Synthetic sequence
gagccaatctgagccatgat

SEQ ID NO: 3924 - DNA, 20 bp, Artificial Sequence
  Synthetic sequence
gagccaatctgagccatgat

SEQ ID NO: 3925 - DNA, 20 bp, Artificial Sequence
  Synthetic sequence
gagccaatctgagccatgat

SEQ ID NO: 3926 - DNA, 20 bp, Artificial Sequence
  Synthetic sequence
gagccaatctgagccatgat

SEQ ID NO: 3927 - DNA, 20 bp, Artificial Sequence
  Synthetic sequence
gagccaatctgagccatgat

SEQ ID NO: 3928 - DNA, 20 bp, Artificial Sequence
  Synthetic sequence
gagccaatctgagccatgat

SEQ ID NO: 3929 - DNA, 20 bp, Artificial Sequence
  Synthetic sequence
gagccaatctgagccatgat

SEQ ID NO: 3930 - DNA, 20 bp, Artificial Sequence
  Synthetic sequence
gagccaatctgagccatgat

SEQ ID NO: 3931 - DNA, 20 bp, Artificial Sequence
  Synthetic sequence
gagccaatctgagccatgat

SEQ ID NO: 3932 - DNA, 20 bp, Artificial Sequence
  Synthetic sequence
gagccaatctgagccatgat

SEQ ID NO: 3933 - DNA, 20 bp, Artificial Sequence
  Synthetic sequence
gagccaatctgagccatgat

SEQ ID NO: 3934 - DNA, 20 bp, Artificial Sequence
  Synthetic sequence
gagccaatctgagccatgat

SEQ ID NO: 3935 - DNA, 20 bp, Artificial Sequence
  Synthetic sequence
gagccaatctgagccatgat

SEQ ID NO: 3936 - DNA, 20 bp, Artificial Sequence
  Synthetic sequence
gagccaatctgagccatgat

SEQ ID NO: 3937 - DNA, 19 bp, Artificial Sequence
  Synthetic sequence
gagccaatctgagccatga

SEQ ID NO: 3938 - DNA, 19 bp, Artificial Sequence
  Synthetic sequence
gagccaatctgagccatga

SEQ ID NO: 3939 - DNA, 19 bp, Artificial Sequence
  Synthetic sequence
gagccaatctgagccatga

SEQ ID NO: 3940 - DNA, 19 bp, Artificial Sequence
  Synthetic sequence
gagccaatctgagccatga

SEQ ID NO: 3941 - DNA, 19 bp, Artificial Sequence
  Synthetic sequence
gagccaatctgagccatga

SEQ ID NO: 3942 - DNA, 19 bp, Artificial Sequence
  Synthetic sequence
agccaatctgagccatgat

SEQ ID NO: 3943 - DNA, 19 bp, Artificial Sequence
  Synthetic sequence
agccaatctgagccatgat

SEQ ID NO: 3944 - DNA, 19 bp, Artificial Sequence
  Synthetic sequence
agccaatctgagccatgat

SEQ ID NO: 3945 - DNA, 19 bp, Artificial Sequence
  Synthetic sequence
agccaatctgagccatgat

SEQ ID NO: 3946 - DNA, 19 bp, Artificial Sequence
  Synthetic sequence
agccaatctgagccatgat

SEQ ID NO: 3947 - DNA, 20 bp, Artificial Sequence
  Synthetic sequence
gagccaatctgagccatgat

SEQ ID NO: 3948 - DNA, 20 bp, Artificial Sequence
  Synthetic sequence
gagccaatctgagccatgat

SEQ ID NO: 3949 - DNA, 20 bp, Artificial Sequence
  Synthetic sequence
gagccaatctgagccatgat

SEQ ID NO: 3950 - DNA, 20 bp, Artificial Sequence
  Synthetic sequence
gagccaatctgagccatgat

SEQ ID NO: 3951 - DNA, 20 bp, Artificial Sequence
  Synthetic sequence
gagccaatctgagccatgat

SEQ ID NO: 3952 - DNA, 20 bp, Artificial Sequence
  Synthetic sequence
gagccaatctgagccatgat

SEQ ID NO: 3953 - DNA, 20 bp, Artificial Sequence
  Synthetic sequence
gagccaatctgagccatgat

SEQ ID NO: 3954 - DNA, 20 bp, Artificial Sequence
  Synthetic sequence
gagccaatctgagccatgat

SEQ ID NO: 3955 - DNA, 19 bp, Artificial Sequence
  Synthetic sequence
gagccaatctgagccatga

SEQ ID NO: 3956 - DNA, 19 bp, Artificial Sequence
  Synthetic sequence
gagccaatctgagccatga

SEQ ID NO: 3957 - DNA, 19 bp, Artificial Sequence
  Synthetic sequence
gagccaatctgagccatga

SEQ ID NO: 3958 - DNA, 19 bp, Artificial Sequence
  Synthetic sequence
gagccaatctgagccatga

SEQ ID NO: 3959 - DNA, 20 bp, Artificial Sequence
  Synthetic sequence
gagccaatctgagccatgat

SEQ ID NO: 3960 - DNA, 20 bp, Artificial Sequence
  Synthetic sequence
gagccaatctgagccatgat

SEQ ID NO: 3961 - DNA, 20 bp, Artificial Sequence
  Synthetic sequence
gagccaatctgagccatgat

SEQ ID NO: 3962 - DNA, 18 bp, Artificial Sequence
  Synthetic sequence
gagccaatctgagccatg

SEQ ID NO: 3963 - DNA, 18 bp, Artificial Sequence
  Synthetic sequence
gagccaatctgagccatg

SEQ ID NO: 3964 - DNA, 18 bp, Artificial Sequence
  Synthetic sequence
gagccaatctgagccatg

SEQ ID NO: 3965 - DNA, 18 bp, Artificial Sequence
  Synthetic sequence
gagccaatctgagccatg

SEQ ID NO: 3966 - DNA, 18 bp, Artificial Sequence
  Synthetic sequence
gccaatctgagccatgat

SEQ ID NO: 3967 - DNA, 18 bp, Artificial Sequence
  Synthetic sequence
gccaatctgagccatgat

SEQ ID NO: 3968 - DNA, 18 bp, Artificial Sequence
  Synthetic sequence
gccaatctgagccatgat

SEQ ID NO: 3969 - DNA, 18 bp, Artificial Sequence
  Synthetic sequence
gccaatctgagccatgat

SEQ ID NO: 3970 - DNA, 20 bp, Artificial Sequence
  Synthetic sequence
gagccaatctgagccatgat

SEQ ID NO: 3971 - DNA, 20 bp, Artificial Sequence
  Synthetic sequence
gagccaatctgagccatgat

SEQ ID NO: 3972 - DNA, 20 bp, Artificial Sequence
  Synthetic sequence
gagccaatctgagccatgat

SEQ ID NO: 3973 - DNA, 20 bp, Artificial Sequence
  Synthetic sequence
gagccaatctgagccatgat

SEQ ID NO: 3974 - DNA, 20 bp, Artificial Sequence
  Synthetic sequence
gagccaatctgagccatgat

SEQ ID NO: 3975 - DNA, 20 bp, Artificial Sequence
  Synthetic sequence
gagccaatctgagccatgat

SEQ ID NO: 3976 - DNA, 19 bp, Artificial Sequence
  Synthetic sequence
gagccaatctgagccatga

SEQ ID NO: 3977 - DNA, 19 bp, Artificial Sequence
  Synthetic sequence
gagccaatctgagccatga

SEQ ID NO: 3978 - DNA, 19 bp, Artificial Sequence
  Synthetic sequence
gagccaatctgagccatga

SEQ ID NO: 3979 - DNA, 19 bp, Artificial Sequence
  Synthetic sequence
agccaatctgagccatgat

SEQ ID NO: 3980 - DNA, 19 bp, Artificial Sequence
  Synthetic sequence
agccaatctgagccatgat

SEQ ID NO: 3981 - DNA, 19 bp, Artificial Sequence
  Synthetic sequence
agccaatctgagccatgat

SEQ ID NO: 3982 - DNA, 18 bp, Artificial Sequence
  Synthetic sequence
gagccaatctgagccatg

SEQ ID NO: 3983 - DNA, 18 bp, Artificial Sequence
  Synthetic sequence
gagccaatctgagccatg

SEQ ID NO: 3984 - DNA, 18 bp, Artificial Sequence
  Synthetic sequence
gagccaatctgagccatg

SEQ ID NO: 3985 - DNA, 18 bp, Artificial Sequence
  Synthetic sequence
gccaatctgagccatgat

SEQ ID NO: 3986 - DNA, 18 bp, Artificial Sequence
  Synthetic sequence
gccaatctgagccatgat

SEQ ID NO: 3987 - DNA, 18 bp, Artificial Sequence
  Synthetic sequence
gccaatctgagccatgat

SEQ ID NO: 3988 - DNA, 17 bp, Artificial Sequence
  Synthetic sequence
gagccaatctgagccat

SEQ ID NO: 3989 - DNA, 17 bp, Artificial Sequence
  Synthetic sequence
gagccaatctgagccat

SEQ ID NO: 3990 - DNA, 17 bp, Artificial Sequence
  Synthetic sequence
gagccaatctgagccat

SEQ ID NO: 3991 - DNA, 17 bp, Artificial Sequence
  Synthetic sequence
ccaatctgagccatgat

SEQ ID NO: 3992 - DNA, 17 bp, Artificial Sequence
  Synthetic sequence
ccaatctgagccatgat

SEQ ID NO: 3993 - DNA, 17 bp, Artificial Sequence
  Synthetic sequence
ccaatctgagccatgat

SEQ ID NO: 3994 - DNA, 19 bp, Artificial Sequence
  Synthetic sequence
agccaatctgagccatgat

SEQ ID NO: 3995 - DNA, 19 bp, Artificial Sequence
  Synthetic sequence
agccaatctgagccatgat

SEQ ID NO: 3996 - DNA, 19 bp, Artificial Sequence
  Synthetic sequence
gagccaatctgagccatga

SEQ ID NO: 3997 - DNA, 19 bp, Artificial Sequence
  Synthetic sequence
gagccaatctgagccatga

SEQ ID NO: 3998 - DNA, 18 bp, Artificial Sequence
  Synthetic sequence
agccaatctgagccatga

SEQ ID NO: 3999 - DNA, 18 bp, Artificial Sequence
  Synthetic sequence
agccaatctgagccatga

SEQ ID NO: 4000 - DNA, 18 bp, Artificial Sequence
  Synthetic sequence
agccaatctgagccatga

SEQ ID NO: 4001 - DNA, 18 bp, Artificial Sequence
  Synthetic sequence
agccaatctgagccatga

SEQ ID NO: 4002 - DNA, 17 bp, Artificial Sequence
  Synthetic sequence
agccaatctgagccatg

SEQ ID NO: 4003 - DNA, 17 bp, Artificial Sequence
  Synthetic sequence
agccaatctgagccatg

SEQ ID NO: 4004 - DNA, 17 bp, Artificial Sequence
  Synthetic sequence
agccaatctgagccatg

SEQ ID NO: 4005 - DNA, 20 bp, Artificial Sequence
  Synthetic sequence
gagccaatctgagccatgat

SEQ ID NO: 4006 - DNA, 20 bp, Artificial Sequence
  Synthetic sequence
gagccaatctgagccatgat

SEQ ID NO: 4007 - DNA, 20 bp, Artificial Sequence
  Synthetic sequence
gagccaatctgagccatgat

SEQ ID NO: 4008 - DNA, 20 bp, Artificial Sequence
  Synthetic sequence
gagccaatctgagccatgat

SEQ ID NO: 4009 - DNA, 19 bp, Artificial Sequence
  Synthetic sequence
gagccaatctgagccatga

SEQ ID NO: 4010 - DNA, 19 bp, Artificial Sequence
  Synthetic sequence
agccaatctgagccatgat

SEQ ID NO: 4011 - DNA, 20 bp, Artificial Sequence
  Synthetic sequence
gagccaatctgagccatgat

SEQ ID NO: 4012 - DNA, 20 bp, Artificial Sequence
  Synthetic sequence
gagccaatctgagccatgat

SEQ ID NO: 4013 - DNA, 19 bp, Artificial Sequence
  Synthetic sequence
gagccaatctgagccatga

SEQ ID NO: 4014 - DNA, 20 bp, Artificial Sequence
  Synthetic sequence
gagccaatctgagccatgat

SEQ ID NO: 4015 - DNA, 18 bp, Artificial Sequence
  Synthetic sequence
gagccaatctgagccatg

SEQ ID NO: 4016 - DNA, 18 bp, Artificial Sequence
  Synthetic sequence
gccaatctgagccatgat

SEQ ID NO: 4017 - DNA, 20 bp, Artificial Sequence
  Synthetic sequence
gagccaatctgagccatgat

SEQ ID NO: 4018 - DNA, 19 bp, Artificial Sequence
  Synthetic sequence
gagccaatctgagccatga

SEQ ID NO: 4019 - DNA, 18 bp, Artificial Sequence
  Synthetic sequence
gagccaatctgagccatg

SEQ ID NO: 4020 - DNA, 18 bp, Artificial Sequence
  Synthetic sequence
gccaatctgagccatgat

SEQ ID NO: 4021 - DNA, 17 bp, Artificial Sequence
  Synthetic sequence
gagccaatctgagccat

SEQ ID NO: 4022 - DNA, 17 bp, Artificial Sequence
  Synthetic sequence
ccaatctgagccatgat

SEQ ID NO: 4023 - DNA, 19 bp, Artificial Sequence
  Synthetic sequence
agccaatctgagccatgat

SEQ ID NO: 4024 - DNA, 18 bp, Artificial Sequence
  Synthetic sequence
agccaatctgagccatga

SEQ ID NO: 4025 - DNA, 17 bp, Artificial Sequence
  Synthetic sequence
agccaatctgagccatg

SEQ ID NO: 4026 - DNA, 20 bp, Artificial Sequence
  Synthetic sequence
gagccaatctgagccatgat

SEQ ID NO: 4027 - DNA, 20 bp, Artificial Sequence
  Synthetic sequence
gagccaatctgagccatgat

SEQ ID NO: 4028 - DNA, 20 bp, Artificial Sequence
  Synthetic sequence
gagccaatctgagccatgat

SEQ ID NO: 4029 - DNA, 20 bp, Artificial Sequence
  Synthetic sequence
gagccaatctgagccatgat

SEQ ID NO: 4030 - DNA, 20 bp, Artificial Sequence
  Synthetic sequence
gagccaatctgagccatgat

SEQ ID NO: 4031 - DNA, 20 bp, Artificial Sequence
  Synthetic sequence
gagccaatctgagccatgat

SEQ ID NO: 4032 - DNA, 20 bp, Artificial Sequence
  Synthetic sequence
gagccaatctgagccatgat

SEQ ID NO: 4033 - DNA, 20 bp, Artificial Sequence
  Synthetic sequence
gagccaatctgagccatgat

SEQ ID NO: 4034 - DNA, 20 bp, Artificial Sequence
  Synthetic sequence
gagccaatctgagccatgat

SEQ ID NO: 4035 - DNA, 20 bp, Artificial Sequence
  Synthetic sequence
gagccaatctgagccatgat

SEQ ID NO: 4036 - DNA, 20 bp, Artificial Sequence
  Synthetic sequence
gagccaatctgagccatgat

SEQ ID NO: 4037 - DNA, 20 bp, Artificial Sequence
  Synthetic sequence
gagccaatctgagccatgat

SEQ ID NO: 4038 - DNA, 20 bp, Artificial Sequence
  Synthetic sequence
gagccaatctgagccatgat

SEQ ID NO: 4039 - DNA, 20 bp, Artificial Sequence
  Synthetic sequence
gagccaatctgagccatgat

SEQ ID NO: 4040 - DNA, 20 bp, Artificial Sequence
  Synthetic sequence
gagccaatctgagccatgat

SEQ ID NO: 4041 - DNA, 21 bp, Artificial Sequence
  Synthetic sequence
gagccaatctgagccatgatg

SEQ ID NO: 4042 - DNA, 21 bp, Artificial Sequence
  Synthetic sequence
gagccaatctgagccatgatg

SEQ ID NO: 4043 - DNA, 21 bp, Artificial Sequence
  Synthetic sequence
gagccaatctgagccatgatg

SEQ ID NO: 4044 - DNA, 21 bp, Artificial Sequence
  Synthetic sequence
gagccaatctgagccatgatg

SEQ ID NO: 4045 - DNA, 21 bp, Artificial Sequence
  Synthetic sequence
gagccaatctgagccatgatg

SEQ ID NO: 4046 - DNA, 21 bp, Artificial Sequence
  Synthetic sequence
gagccaatctgagccatgatg

SEQ ID NO: 4047 - DNA, 21 bp, Artificial Sequence
  Synthetic sequence
gagccaatctgagccatgatg

SEQ ID NO: 4048 - DNA, 21 bp, Artificial Sequence
  Synthetic sequence
gagccaatctgagccatgatg

SEQ ID NO: 4049 - DNA, 21 bp, Artificial Sequence
  Synthetic sequence
gagccaatctgagccatgatg

SEQ ID NO: 4050 - DNA, 21 bp, Artificial Sequence
  Synthetic sequence
gagccaatctgagccatgatg

SEQ ID NO: 4051 - DNA, 21 bp, Artificial Sequence
  Synthetic sequence
gagccaatctgagccatgatg

SEQ ID NO: 4052 - DNA, 21 bp, Artificial Sequence
  Synthetic sequence
gagccaatctgagccatgatg

SEQ ID NO: 4053 - DNA, 21 bp, Artificial Sequence
  Synthetic sequence
gagccaatctgagccatgatg

SEQ ID NO: 4054 - DNA, 21 bp, Artificial Sequence
  Synthetic sequence
gagccaatctgagccatgatg

SEQ ID NO: 4055 - DNA, 21 bp, Artificial Sequence
  Synthetic sequence
gagccaatctgagccatgatg

SEQ ID NO: 4056 - DNA, 21 bp, Artificial Sequence
  Synthetic sequence
gagccaatctgagccatgatg

SEQ ID NO: 4057 - DNA, 22 bp, Artificial Sequence
  Synthetic sequence
gagccaatctgagccatgatgg

SEQ ID NO: 4058 - DNA, 22 bp, Artificial Sequence
  Synthetic sequence
gagccaatctgagccatgatgg

SEQ ID NO: 4059 - DNA, 22 bp, Artificial Sequence
  Synthetic sequence
gagccaatctgagccatgatgg

SEQ ID NO: 4060 - DNA, 22 bp, Artificial Sequence
  Synthetic sequence
gagccaatctgagccatgatgg

SEQ ID NO: 4061 - DNA, 22 bp, Artificial Sequence
  Synthetic sequence
gagccaatctgagccatgatgg

SEQ ID NO: 4062 - DNA, 22 bp, Artificial Sequence
  Synthetic sequence
gagccaatctgagccatgatgg

SEQ ID NO: 4063 - DNA, 22 bp, Artificial Sequence
  Synthetic sequence
gagccaatctgagccatgatgg

SEQ ID NO: 4064 - DNA, 22 bp, Artificial Sequence
  Synthetic sequence
gagccaatctgagccatgatgg

SEQ ID NO: 4065 - DNA, 22 bp, Artificial Sequence
  Synthetic sequence
gagccaatctgagccatgatgg

SEQ ID NO: 4066 - DNA, 22 bp, Artificial Sequence
  Synthetic sequence
gagccaatctgagccatgatgg

SEQ ID NO: 4067 - DNA, 22 bp, Artificial Sequence
  Synthetic sequence
gagccaatctgagccatgatgg

SEQ ID NO: 4068 - DNA, 22 bp, Artificial Sequence
  Synthetic sequence
gagccaatctgagccatgatgg

SEQ ID NO: 4069 - DNA, 22 bp, Artificial Sequence
  Synthetic sequence
gagccaatctgagccatgatgg

SEQ ID NO: 4070 - DNA, 22 bp, Artificial Sequence
  Synthetic sequence
gagccaatctgagccatgatgg

SEQ ID NO: 4071 - DNA, 22 bp, Artificial Sequence
  Synthetic sequence
gagccaatctgagccatgatgg

SEQ ID NO: 4072 - DNA, 22 bp, Artificial Sequence
  Synthetic sequence
gagccaatctgagccatgatgg

SEQ ID NO: 4073 - DNA, 23 bp, Artificial Sequence
  Synthetic sequence
gagccaatctgagccatgatggt

SEQ ID NO: 4074 - DNA, 23 bp, Artificial Sequence
  Synthetic sequence
gagccaatctgagccatgatggt

SEQ ID NO: 4075 - DNA, 23 bp, Artificial Sequence
  Synthetic sequence
gagccaatctgagccatgatggt

SEQ ID NO: 4076 - DNA, 23 bp, Artificial Sequence
  Synthetic sequence
gagccaatctgagccatgatggt

SEQ ID NO: 4077 - DNA, 23 bp, Artificial Sequence
  Synthetic sequence
gagccaatctgagccatgatggt

SEQ ID NO: 4078 - DNA, 23 bp, Artificial Sequence
  Synthetic sequence
gagccaatctgagccatgatggt

SEQ ID NO: 4079 - DNA, 23 bp, Artificial Sequence
  Synthetic sequence
gagccaatctgagccatgatggt

SEQ ID NO: 4080 - DNA, 23 bp, Artificial Sequence
  Synthetic sequence
gagccaatctgagccatgatggt

SEQ ID NO: 4081 - DNA, 23 bp, Artificial Sequence
  Synthetic sequence
gagccaatctgagccatgatggt

SEQ ID NO: 4082 - DNA, 23 bp, Artificial Sequence
  Synthetic sequence
gagccaatctgagccatgatggt

SEQ ID NO: 4083 - DNA, 23 bp, Artificial Sequence
  Synthetic sequence
gagccaatctgagccatgatggt

SEQ ID NO: 4084 - DNA, 23 bp, Artificial Sequence
  Synthetic sequence
gagccaatctgagccatgatggt

SEQ ID NO: 4085 - DNA, 23 bp, Artificial Sequence
  Synthetic sequence
gagccaatctgagccatgatggt

SEQ ID NO: 4086 - DNA, 23 bp, Artificial Sequence
  Synthetic sequence
gagccaatctgagccatgatggt

SEQ ID NO: 4087 - DNA, 23 bp, Artificial Sequence
  Synthetic sequence
gagccaatctgagccatgatggt

SEQ ID NO: 4088 - DNA, 23 bp, Artificial Sequence
  Synthetic sequence
gagccaatctgagccatgatggt

SEQ ID NO: 4089 - DNA, 21 bp, Artificial Sequence
  Synthetic sequence
gagccaatctgagccatgatg

SEQ ID NO: 4090 - DNA, 21 bp, Artificial Sequence
  Synthetic sequence
gagccaatctgagccatgatg

SEQ ID NO: 4091 - DNA, 21 bp, Artificial Sequence
  Synthetic sequence
gagccaatctgagccatgatg

SEQ ID NO: 4092 - DNA, 21 bp, Artificial Sequence
  Synthetic sequence
gagccaatctgagccatgatg

SEQ ID NO: 4093 - DNA, 21 bp, Artificial Sequence
  Synthetic sequence
gagccaatctgagccatgatg

SEQ ID NO: 4094 - DNA, 21 bp, Artificial Sequence
  Synthetic sequence
gagccaatctgagccatgatg

SEQ ID NO: 4095 - DNA, 21 bp, Artificial Sequence
  Synthetic sequence
gagccaatctgagccatgatg

SEQ ID NO: 4096 - DNA, 21 bp, Artificial Sequence
  Synthetic sequence
gagccaatctgagccatgatg

SEQ ID NO: 4097 - DNA, 21 bp, Artificial Sequence
  Synthetic sequence
gagccaatctgagccatgatg

SEQ ID NO: 4098 - DNA, 21 bp, Artificial Sequence
  Synthetic sequence
gagccaatctgagccatgatg

SEQ ID NO: 4099 - DNA, 21 bp, Artificial Sequence
  Synthetic sequence
gagccaatctgagccatgatg

SEQ ID NO: 4100 - DNA, 21 bp, Artificial Sequence
  Synthetic sequence
gagccaatctgagccatgatg

SEQ ID NO: 4101 - DNA, 21 bp, Artificial Sequence
  Synthetic sequence
gagccaatctgagccatgatg

SEQ ID NO: 4102 - DNA, 21 bp, Artificial Sequence
  Synthetic sequence
gagccaatctgagccatgatg

SEQ ID NO: 4103 - DNA, 21 bp, Artificial Sequence
  Synthetic sequence
gagccaatctgagccatgatg

SEQ ID NO: 4104 - DNA, 21 bp, Artificial Sequence
  Synthetic sequence
gagccaatctgagccatgatg

SEQ ID NO: 4105 - DNA, 22 bp, Artificial Sequence
  Synthetic sequence
gagccaatctgagccatgatgg

SEQ ID NO: 4106 - DNA, 22 bp, Artificial Sequence
  Synthetic sequence
gagccaatctgagccatgatgg

SEQ ID NO: 4107 - DNA, 22 bp, Artificial Sequence
  Synthetic sequence
gagccaatctgagccatgatgg

SEQ ID NO: 4108 - DNA, 22 bp, Artificial Sequence
  Synthetic sequence
gagccaatctgagccatgatgg

SEQ ID NO: 4109 - DNA, 22 bp, Artificial Sequence
  Synthetic sequence
gagccaatctgagccatgatgg

SEQ ID NO: 4110 - DNA, 22 bp, Artificial Sequence
  Synthetic sequence
gagccaatctgagccatgatgg

SEQ ID NO: 4111 - DNA, 22 bp, Artificial Sequence
  Synthetic sequence
gagccaatctgagccatgatgg

SEQ ID NO: 4112 - DNA, 22 bp, Artificial Sequence
  Synthetic sequence
gagccaatctgagccatgatgg

SEQ ID NO: 4113 - DNA, 22 bp, Artificial Sequence
  Synthetic sequence
gagccaatctgagccatgatgg

SEQ ID NO: 4114 - DNA, 22 bp, Artificial Sequence
  Synthetic sequence
gagccaatctgagccatgatgg

SEQ ID NO: 4115 - DNA, 22 bp, Artificial Sequence
  Synthetic sequence
gagccaatctgagccatgatgg

SEQ ID NO: 4116 - DNA, 22 bp, Artificial Sequence
  Synthetic sequence
gagccaatctgagccatgatgg

SEQ ID NO: 4117 - DNA, 22 bp, Artificial Sequence
  Synthetic sequence
gagccaatctgagccatgatgg

SEQ ID NO: 4118 - DNA, 22 bp, Artificial Sequence
  Synthetic sequence
gagccaatctgagccatgatgg

SEQ ID NO: 4119 - DNA, 22 bp, Artificial Sequence
  Synthetic sequence
gagccaatctgagccatgatgg

SEQ ID NO: 4120 - DNA, 22 bp, Artificial Sequence
  Synthetic sequence
gagccaatctgagccatgatgg

SEQ ID NO: 4121 - DNA, 20 bp, Artificial Sequence
  Synthetic sequence
taggagccaatctgagccat

SEQ ID NO: 4122 - DNA, 20 bp, Artificial Sequence
  Synthetic sequence
taggagccaatctgagccat

SEQ ID NO: 4123 - DNA, 20 bp, Artificial Sequence
  Synthetic sequence
taggagccaatctgagccat

SEQ ID NO: 4124 - DNA, 20 bp, Artificial Sequence
  Synthetic sequence
taggagccaatctgagccat

SEQ ID NO: 4125 - DNA, 20 bp, Artificial Sequence
  Synthetic sequence
taggagccaatctgagccat

SEQ ID NO: 4126 - DNA, 20 bp, Artificial Sequence
  Synthetic sequence
taggagccaatctgagccat

SEQ ID NO: 4127 - DNA, 20 bp, Artificial Sequence
  Synthetic sequence
taggagccaatctgagccat

SEQ ID NO: 4128 - DNA, 20 bp, Artificial Sequence
  Synthetic sequence
taggagccaatctgagccat

SEQ ID NO: 4129 - DNA, 20 bp, Artificial Sequence
  Synthetic sequence
taggagccaatctgagccat

SEQ ID NO: 4130 - DNA, 20 bp, Artificial Sequence
  Synthetic sequence
taggagccaatctgagccat

SEQ ID NO: 4131 - DNA, 20 bp, Artificial Sequence
  Synthetic sequence
taggagccaatctgagccat

SEQ ID NO: 4132 - DNA, 20 bp, Artificial Sequence
  Synthetic sequence
taggagccaatctgagccat

SEQ ID NO: 4133 - DNA, 20 bp, Artificial Sequence
  Synthetic sequence
taggagccaatctgagccat

SEQ ID NO: 4134 - DNA, 20 bp, Artificial Sequence
  Synthetic sequence
taggagccaatctgagccat

SEQ ID NO: 4135 - DNA, 20 bp, Artificial Sequence
  Synthetic sequence
taggagccaatctgagccat

SEQ ID NO: 4136 - DNA, 20 bp, Artificial Sequence
  Synthetic sequence
taggagccaatctgagccat

SEQ ID NO: 4137 - DNA, 20 bp, Artificial Sequence
  Synthetic sequence
taggagccaatctgagccat

SEQ ID NO: 4138 - DNA, 20 bp, Artificial Sequence
  Synthetic sequence
taggagccaatctgagccat

SEQ ID NO: 4139 - DNA, 20 bp, Artificial Sequence
  Synthetic sequence
taggagccaatctgagccat

SEQ ID NO: 4140 - DNA, 20 bp, Artificial Sequence
  Synthetic sequence
taggagccaatctgagccat

SEQ ID NO: 4141 - DNA, 20 bp, Artificial Sequence
  Synthetic sequence
taggagccaatctgagccat

SEQ ID NO: 4142 - DNA, 20 bp, Artificial Sequence
  Synthetic sequence
taggagccaatctgagccat

SEQ ID NO: 4143 - DNA, 19 bp, Artificial Sequence
  Synthetic sequence
taggagccaatctgagcca

SEQ ID NO: 4144 - DNA, 19 bp, Artificial Sequence
  Synthetic sequence
taggagccaatctgagcca

SEQ ID NO: 4145 - DNA, 19 bp, Artificial Sequence
  Synthetic sequence
taggagccaatctgagcca

SEQ ID NO: 4146 - DNA, 19 bp, Artificial Sequence
  Synthetic sequence
taggagccaatctgagcca

SEQ ID NO: 4147 - DNA, 19 bp, Artificial Sequence
  Synthetic sequence
taggagccaatctgagcca

SEQ ID NO: 4148 - DNA, 19 bp, Artificial Sequence
  Synthetic sequence
aggagccaatctgagccat

SEQ ID NO: 4149 - DNA, 19 bp, Artificial Sequence
  Synthetic sequence
aggagccaatctgagccat

SEQ ID NO: 4150 - DNA, 19 bp, Artificial Sequence
  Synthetic sequence
aggagccaatctgagccat

SEQ ID NO: 4151 - DNA, 19 bp, Artificial Sequence
  Synthetic sequence
aggagccaatctgagccat

SEQ ID NO: 4152 - DNA, 19 bp, Artificial Sequence
  Synthetic sequence
aggagccaatctgagccat

SEQ ID NO: 4153 - DNA, 20 bp, Artificial Sequence
  Synthetic sequence
taggagccaatctgagccat

SEQ ID NO: 4154 - DNA, 20 bp, Artificial Sequence
  Synthetic sequence
taggagccaatctgagccat

SEQ ID NO: 4155 - DNA, 20 bp, Artificial Sequence
  Synthetic sequence
taggagccaatctgagccat

SEQ ID NO: 4156 - DNA, 20 bp, Artificial Sequence
  Synthetic sequence
taggagccaatctgagccat

SEQ ID NO: 4157 - DNA, 20 bp, Artificial Sequence
  Synthetic sequence
taggagccaatctgagccat

SEQ ID NO: 4158 - DNA, 20 bp, Artificial Sequence
  Synthetic sequence
taggagccaatctgagccat

SEQ ID NO: 4159 - DNA, 20 bp, Artificial Sequence
  Synthetic sequence
taggagccaatctgagccat

SEQ ID NO: 4160 - DNA, 20 bp, Artificial Sequence
  Synthetic sequence
taggagccaatctgagccat

SEQ ID NO: 4161 - DNA, 19 bp, Artificial Sequence
  Synthetic sequence
taggagccaatctgagcca

SEQ ID NO: 4162 - DNA, 19 bp, Artificial Sequence
  Synthetic sequence
taggagccaatctgagcca

SEQ ID NO: 4163 - DNA, 19 bp, Artificial Sequence
  Synthetic sequence
taggagccaatctgagcca

SEQ ID NO: 4164 - DNA, 19 bp, Artificial Sequence
  Synthetic sequence
taggagccaatctgagcca

SEQ ID NO: 4165 - DNA, 20 bp, Artificial Sequence
  Synthetic sequence
taggagccaatctgagccat

SEQ ID NO: 4166 - DNA, 20 bp, Artificial Sequence
  Synthetic sequence
taggagccaatctgagccat

SEQ ID NO: 4167 - DNA, 20 bp, Artificial Sequence
  Synthetic sequence
taggagccaatctgagccat

SEQ ID NO: 4168 - DNA, 18 bp, Artificial Sequence
  Synthetic sequence
taggagccaatctgagcc

SEQ ID NO: 4169 - DNA, 18 bp, Artificial Sequence
  Synthetic sequence
taggagccaatctgagcc

SEQ ID NO: 4170 - DNA, 18 bp, Artificial Sequence
  Synthetic sequence
taggagccaatctgagcc

SEQ ID NO: 4171 - DNA, 18 bp, Artificial Sequence
  Synthetic sequence
taggagccaatctgagcc

SEQ ID NO: 4172 - DNA, 18 bp, Artificial Sequence
  Synthetic sequence
ggagccaatctgagccat

SEQ ID NO: 4173 - DNA, 18 bp, Artificial Sequence
  Synthetic sequence
ggagccaatctgagccat

SEQ ID NO: 4174 - DNA, 18 bp, Artificial Sequence
  Synthetic sequence
ggagccaatctgagccat

SEQ ID NO: 4175 - DNA, 18 bp, Artificial Sequence
  Synthetic sequence
ggagccaatctgagccat

SEQ ID NO: 4176 - DNA, 20 bp, Artificial Sequence
  Synthetic sequence
taggagccaatctgagccat

SEQ ID NO: 4177 - DNA, 20 bp, Artificial Sequence
  Synthetic sequence
taggagccaatctgagccat

SEQ ID NO: 4178 - DNA, 20 bp, Artificial Sequence
  Synthetic sequence
taggagccaatctgagccat

SEQ ID NO: 4179 - DNA, 20 bp, Artificial Sequence
  Synthetic sequence
taggagccaatctgagccat

SEQ ID NO: 4180 - DNA, 20 bp, Artificial Sequence
  Synthetic sequence
taggagccaatctgagccat

SEQ ID NO: 4181 - DNA, 20 bp, Artificial Sequence
  Synthetic sequence
taggagccaatctgagccat

SEQ ID NO: 4182 - DNA, 19 bp, Artificial Sequence
  Synthetic sequence
taggagccaatctgagcca

SEQ ID NO: 4183 - DNA, 19 bp, Artificial Sequence
  Synthetic sequence
taggagccaatctgagcca

SEQ ID NO: 4184 - DNA, 19 bp, Artificial Sequence
  Synthetic sequence
taggagccaatctgagcca

SEQ ID NO: 4185 - DNA, 19 bp, Artificial Sequence
  Synthetic sequence
aggagccaatctgagccat

SEQ ID NO: 4186 - DNA, 19 bp, Artificial Sequence
  Synthetic sequence
aggagccaatctgagccat

SEQ ID NO: 4187 - DNA, 19 bp, Artificial Sequence
  Synthetic sequence
aggagccaatctgagccat

SEQ ID NO: 4188 - DNA, 18 bp, Artificial Sequence
  Synthetic sequence
taggagccaatctgagcc

SEQ ID NO: 4189 - DNA, 18 bp, Artificial Sequence
  Synthetic sequence
taggagccaatctgagcc

SEQ ID NO: 4190 - DNA, 18 bp, Artificial Sequence
  Synthetic sequence
taggagccaatctgagcc

SEQ ID NO: 4191 - DNA, 18 bp, Artificial Sequence
  Synthetic sequence
ggagccaatctgagccat

SEQ ID NO: 4192 - DNA, 18 bp, Artificial Sequence
  Synthetic sequence
ggagccaatctgagccat

SEQ ID NO: 4193 - DNA, 18 bp, Artificial Sequence
  Synthetic sequence
ggagccaatctgagccat

SEQ ID NO: 4194 - DNA, 17 bp, Artificial Sequence
  Synthetic sequence
taggagccaatctgagc

SEQ ID NO: 4195 - DNA, 17 bp, Artificial Sequence
  Synthetic sequence
taggagccaatctgagc

SEQ ID NO: 4196 - DNA, 17 bp, Artificial Sequence
  Synthetic sequence
taggagccaatctgagc

SEQ ID NO: 4197 - DNA, 17 bp, Artificial Sequence
  Synthetic sequence
gagccaatctgagccat

SEQ ID NO: 4198 - DNA, 17 bp, Artificial Sequence
  Synthetic sequence
gagccaatctgagccat

SEQ ID NO: 4199 - DNA, 17 bp, Artificial Sequence
  Synthetic sequence
gagccaatctgagccat

SEQ ID NO: 4200 - DNA, 19 bp, Artificial Sequence
  Synthetic sequence
aggagccaatctgagccat

SEQ ID NO: 4201 - DNA, 19 bp, Artificial Sequence
  Synthetic sequence
aggagccaatctgagccat

SEQ ID NO: 4202 - DNA, 19 bp, Artificial Sequence
  Synthetic sequence
taggagccaatctgagcca

SEQ ID NO: 4203 - DNA, 19 bp, Artificial Sequence
  Synthetic sequence
taggagccaatctgagcca

SEQ ID NO: 4204 - DNA, 18 bp, Artificial Sequence
  Synthetic sequence
aggagccaatctgagcca

SEQ ID NO: 4205 - DNA, 18 bp, Artificial Sequence
  Synthetic sequence
aggagccaatctgagcca

SEQ ID NO: 4206 - DNA, 18 bp, Artificial Sequence
  Synthetic sequence
aggagccaatctgagcca

SEQ ID NO: 4207 - DNA, 18 bp, Artificial Sequence
  Synthetic sequence
aggagccaatctgagcca

SEQ ID NO: 4208 - DNA, 17 bp, Artificial Sequence
  Synthetic sequence
aggagccaatctgagcc

SEQ ID NO: 4209 - DNA, 17 bp, Artificial Sequence
  Synthetic sequence
aggagccaatctgagcc

SEQ ID NO: 4210 - DNA, 17 bp, Artificial Sequence
  Synthetic sequence
aggagccaatctgagcc

SEQ ID NO: 4211 - DNA, 20 bp, Artificial Sequence
  Synthetic sequence
taggagccaatctgagccat

SEQ ID NO: 4212 - DNA, 20 bp, Artificial Sequence
  Synthetic sequence
taggagccaatctgagccat

SEQ ID NO: 4213 - DNA, 20 bp, Artificial Sequence
  Synthetic sequence
taggagccaatctgagccat

SEQ ID NO: 4214 - DNA, 20 bp, Artificial Sequence
  Synthetic sequence
taggagccaatctgagccat

SEQ ID NO: 4215 - DNA, 19 bp, Artificial Sequence
  Synthetic sequence
taggagccaatctgagcca

SEQ ID NO: 4216 - DNA, 19 bp, Artificial Sequence
  Synthetic sequence
aggagccaatctgagccat

SEQ ID NO: 4217 - DNA, 20 bp, Artificial Sequence
  Synthetic sequence
taggagccaatctgagccat

SEQ ID NO: 4218 - DNA, 20 bp, Artificial Sequence
  Synthetic sequence
taggagccaatctgagccat

SEQ ID NO: 4219 - DNA, 19 bp, Artificial Sequence
  Synthetic sequence
taggagccaatctgagcca

SEQ ID NO: 4220 - DNA, 20 bp, Artificial Sequence
  Synthetic sequence
taggagccaatctgagccat

SEQ ID NO: 4221 - DNA, 18 bp, Artificial Sequence
  Synthetic sequence
taggagccaatctgagcc

SEQ ID NO: 4222 - DNA, 18 bp, Artificial Sequence
  Synthetic sequence
ggagccaatctgagccat

SEQ ID NO: 4223 - DNA, 20 bp, Artificial Sequence
  Synthetic sequence
taggagccaatctgagccat

SEQ ID NO: 4224 - DNA, 19 bp, Artificial Sequence
  Synthetic sequence
taggagccaatctgagcca

SEQ ID NO: 4225 - DNA, 18 bp, Artificial Sequence
  Synthetic sequence
taggagccaatctgagcc

SEQ ID NO: 4226 - DNA, 18 bp, Artificial Sequence
  Synthetic sequence
ggagccaatctgagccat

SEQ ID NO: 4227 - DNA, 17 bp, Artificial Sequence
  Synthetic sequence
taggagccaatctgagc

SEQ ID NO: 4228 - DNA, 17 bp, Artificial Sequence
  Synthetic sequence
gagccaatctgagccat

SEQ ID NO: 4229 - DNA, 19 bp, Artificial Sequence
  Synthetic sequence
aggagccaatctgagccat

SEQ ID NO: 4230 - DNA, 18 bp, Artificial Sequence
  Synthetic sequence
aggagccaatctgagcca

SEQ ID NO: 4231 - DNA, 17 bp, Artificial Sequence
  Synthetic sequence
aggagccaatctgagcc

SEQ ID NO: 4232 - DNA, 20 bp, Artificial Sequence
  Synthetic sequence
taggagccaatctgagccat

SEQ ID NO: 4233 - DNA, 20 bp, Artificial Sequence
  Synthetic sequence
taggagccaatctgagccat

SEQ ID NO: 4234 - DNA, 20 bp, Artificial Sequence
  Synthetic sequence
taggagccaatctgagccat

SEQ ID NO: 4235 - DNA, 20 bp, Artificial Sequence
  Synthetic sequence
taggagccaatctgagccat

SEQ ID NO: 4236 - DNA, 20 bp, Artificial Sequence
  Synthetic sequence
taggagccaatctgagccat

SEQ ID NO: 4237 - DNA, 20 bp, Artificial Sequence
  Synthetic sequence
taggagccaatctgagccat

SEQ ID NO: 4238 - DNA, 20 bp, Artificial Sequence
  Synthetic sequence
taggagccaatctgagccat

SEQ ID NO: 4239 - DNA, 20 bp, Artificial Sequence
  Synthetic sequence
taggagccaatctgagccat

SEQ ID NO: 4240 - DNA, 20 bp, Artificial Sequence
  Synthetic sequence
taggagccaatctgagccat

SEQ ID NO: 4241 - DNA, 20 bp, Artificial Sequence
  Synthetic sequence
taggagccaatctgagccat

SEQ ID NO: 4242 - DNA, 20 bp, Artificial Sequence
  Synthetic sequence
taggagccaatctgagccat

SEQ ID NO: 4243 - DNA, 20 bp, Artificial Sequence
  Synthetic sequence
taggagccaatctgagccat

SEQ ID NO: 4244 - DNA, 20 bp, Artificial Sequence
  Synthetic sequence
taggagccaatctgagccat

SEQ ID NO: 4245 - DNA, 20 bp, Artificial Sequence
  Synthetic sequence
taggagccaatctgagccat

SEQ ID NO: 4246 - DNA, 20 bp, Artificial Sequence
  Synthetic sequence
taggagccaatctgagccat

SEQ ID NO: 4247 - DNA, 21 bp, Artificial Sequence
  Synthetic sequence
taggagccaatctgagccatg

SEQ ID NO: 4248 - DNA, 21 bp, Artificial Sequence
  Synthetic sequence
taggagccaatctgagccatg

SEQ ID NO: 4249 - DNA, 21 bp, Artificial Sequence
  Synthetic sequence
taggagccaatctgagccatg

SEQ ID NO: 4250 - DNA, 21 bp, Artificial Sequence
  Synthetic sequence
taggagccaatctgagccatg

SEQ ID NO: 4251 - DNA, 21 bp, Artificial Sequence
  Synthetic sequence
taggagccaatctgagccatg

SEQ ID NO: 4252 - DNA, 21 bp, Artificial Sequence
  Synthetic sequence
taggagccaatctgagccatg

SEQ ID NO: 4253 - DNA, 21 bp, Artificial Sequence
  Synthetic sequence
taggagccaatctgagccatg

SEQ ID NO: 4254 - DNA, 21 bp, Artificial Sequence
  Synthetic sequence
taggagccaatctgagccatg

SEQ ID NO: 4255 - DNA, 21 bp, Artificial Sequence
  Synthetic sequence
taggagccaatctgagccatg

SEQ ID NO: 4256 - DNA, 21 bp, Artificial Sequence
  Synthetic sequence
taggagccaatctgagccatg

SEQ ID NO: 4257 - DNA, 21 bp, Artificial Sequence
  Synthetic sequence
taggagccaatctgagccatg

SEQ ID NO: 4258 - DNA, 21 bp, Artificial Sequence
  Synthetic sequence
taggagccaatctgagccatg

SEQ ID NO: 4259 - DNA, 21 bp, Artificial Sequence
  Synthetic sequence
taggagccaatctgagccatg

SEQ ID NO: 4260 - DNA, 21 bp, Artificial Sequence
  Synthetic sequence
taggagccaatctgagccatg

SEQ ID NO: 4261 - DNA, 21 bp, Artificial Sequence
  Synthetic sequence
taggagccaatctgagccatg

SEQ ID NO: 4262 - DNA, 21 bp, Artificial Sequence
  Synthetic sequence
taggagccaatctgagccatg

SEQ ID NO: 4263 - DNA, 22 bp, Artificial Sequence
  Synthetic sequence
taggagccaatctgagccatga

SEQ ID NO: 4264 - DNA, 22 bp, Artificial Sequence
  Synthetic sequence
taggagccaatctgagccatga

SEQ ID NO: 4265 - DNA, 22 bp, Artificial Sequence
  Synthetic sequence
taggagccaatctgagccatga

SEQ ID NO: 4266 - DNA, 22 bp, Artificial Sequence
  Synthetic sequence
taggagccaatctgagccatga

SEQ ID NO: 4267 - DNA, 22 bp, Artificial Sequence
  Synthetic sequence
taggagccaatctgagccatga

SEQ ID NO: 4268 - DNA, 22 bp, Artificial Sequence
  Synthetic sequence
taggagccaatctgagccatga

SEQ ID NO: 4269 - DNA, 22 bp, Artificial Sequence
  Synthetic sequence
taggagccaatctgagccatga

SEQ ID NO: 4270 - DNA, 22 bp, Artificial Sequence
  Synthetic sequence
taggagccaatctgagccatga

SEQ ID NO: 4271 - DNA, 22 bp, Artificial Sequence
  Synthetic sequence
taggagccaatctgagccatga

SEQ ID NO: 4272 - DNA, 22 bp, Artificial Sequence
  Synthetic sequence
taggagccaatctgagccatga

SEQ ID NO: 4273 - DNA, 22 bp, Artificial Sequence
  Synthetic sequence
taggagccaatctgagccatga

SEQ ID NO: 4274 - DNA, 22 bp, Artificial Sequence
  Synthetic sequence
taggagccaatctgagccatga

SEQ ID NO: 4275 - DNA, 22 bp, Artificial Sequence
  Synthetic sequence
taggagccaatctgagccatga

SEQ ID NO: 4276 - DNA, 22 bp, Artificial Sequence
  Synthetic sequence
taggagccaatctgagccatga

SEQ ID NO: 4277 - DNA, 22 bp, Artificial Sequence
  Synthetic sequence
taggagccaatctgagccatga

SEQ ID NO: 4278 - DNA, 22 bp, Artificial Sequence
  Synthetic sequence
taggagccaatctgagccatga

SEQ ID NO: 4279 - DNA, 23 bp, Artificial Sequence
  Synthetic sequence
taggagccaatctgagccatgat

SEQ ID NO: 4280 - DNA, 23 bp, Artificial Sequence
  Synthetic sequence
taggagccaatctgagccatgat

SEQ ID NO: 4281 - DNA, 23 bp, Artificial Sequence
  Synthetic sequence
taggagccaatctgagccatgat

SEQ ID NO: 4282 - DNA, 23 bp, Artificial Sequence
  Synthetic sequence
taggagccaatctgagccatgat

SEQ ID NO: 4283 - DNA, 23 bp, Artificial Sequence
  Synthetic sequence
taggagccaatctgagccatgat

SEQ ID NO: 4284 - DNA, 23 bp, Artificial Sequence
  Synthetic sequence
taggagccaatctgagccatgat

SEQ ID NO: 4285 - DNA, 23 bp, Artificial Sequence
  Synthetic sequence
taggagccaatctgagccatgat

SEQ ID NO: 4286 - DNA, 23 bp, Artificial Sequence
  Synthetic sequence
taggagccaatctgagccatgat

SEQ ID NO: 4287 - DNA, 23 bp, Artificial Sequence
  Synthetic sequence
taggagccaatctgagccatgat

SEQ ID NO: 4288 - DNA, 23 bp, Artificial Sequence
  Synthetic sequence
taggagccaatctgagccatgat

SEQ ID NO: 4289 - DNA, 23 bp, Artificial Sequence
  Synthetic sequence
taggagccaatctgagccatgat

SEQ ID NO: 4290 - DNA, 23 bp, Artificial Sequence
  Synthetic sequence
taggagccaatctgagccatgat

SEQ ID NO: 4291 - DNA, 23 bp, Artificial Sequence
  Synthetic sequence
taggagccaatctgagccatgat

SEQ ID NO: 4292 - DNA, 23 bp, Artificial Sequence
  Synthetic sequence
taggagccaatctgagccatgat

SEQ ID NO: 4293 - DNA, 23 bp, Artificial Sequence
  Synthetic sequence
taggagccaatctgagccatgat

SEQ ID NO: 4294 - DNA, 23 bp, Artificial Sequence
  Synthetic sequence
taggagccaatctgagccatgat

SEQ ID NO: 4295 - DNA, 21 bp, Artificial Sequence
  Synthetic sequence
taggagccaatctgagccatg

SEQ ID NO: 4296 - DNA, 21 bp, Artificial Sequence
  Synthetic sequence
taggagccaatctgagccatg

SEQ ID NO: 4297 - DNA, 21 bp, Artificial Sequence
  Synthetic sequence
taggagccaatctgagccatg

SEQ ID NO: 4298 - DNA, 21 bp, Artificial Sequence
  Synthetic sequence
taggagccaatctgagccatg

SEQ ID NO: 4299 - DNA, 21 bp, Artificial Sequence
  Synthetic sequence
taggagccaatctgagccatg

SEQ ID NO: 4300 - DNA, 21 bp, Artificial Sequence
  Synthetic sequence
taggagccaatctgagccatg

SEQ ID NO: 4301 - DNA, 21 bp, Artificial Sequence
  Synthetic sequence
taggagccaatctgagccatg

SEQ ID NO: 4302 - DNA, 21 bp, Artificial Sequence
  Synthetic sequence
taggagccaatctgagccatg

SEQ ID NO: 4303 - DNA, 21 bp, Artificial Sequence
  Synthetic sequence
taggagccaatctgagccatg

SEQ ID NO: 4304 - DNA, 21 bp, Artificial Sequence
  Synthetic sequence
taggagccaatctgagccatg

SEQ ID NO: 4305 - DNA, 21 bp, Artificial Sequence
  Synthetic sequence
taggagccaatctgagccatg

SEQ ID NO: 4306 - DNA, 21 bp, Artificial Sequence
  Synthetic sequence
taggagccaatctgagccatg

SEQ ID NO: 4307 - DNA, 21 bp, Artificial Sequence
  Synthetic sequence
taggagccaatctgagccatg

SEQ ID NO: 4308 - DNA, 21 bp, Artificial Sequence
  Synthetic sequence
taggagccaatctgagccatg

SEQ ID NO: 4309 - DNA, 21 bp, Artificial Sequence
  Synthetic sequence
taggagccaatctgagccatg

SEQ ID NO: 4310 - DNA, 21 bp, Artificial Sequence
  Synthetic sequence
taggagccaatctgagccatg

SEQ ID NO: 4311 - DNA, 22 bp, Artificial Sequence
  Synthetic sequence
taggagccaatctgagccatga

SEQ ID NO: 4312 - DNA, 22 bp, Artificial Sequence
  Synthetic sequence
taggagccaatctgagccatga

SEQ ID NO: 4313 - DNA, 22 bp, Artificial Sequence
  Synthetic sequence
taggagccaatctgagccatga

SEQ ID NO: 4314 - DNA, 22 bp, Artificial Sequence
  Synthetic sequence
taggagccaatctgagccatga

SEQ ID NO: 4315 - DNA, 22 bp, Artificial Sequence
  Synthetic sequence
taggagccaatctgagccatga

SEQ ID NO: 4316 - DNA, 22 bp, Artificial Sequence
  Synthetic sequence
taggagccaatctgagccatga

SEQ ID NO: 4317 - DNA, 22 bp, Artificial Sequence
  Synthetic sequence
taggagccaatctgagccatga

SEQ ID NO: 4318 - DNA, 22 bp, Artificial Sequence
  Synthetic sequence
taggagccaatctgagccatga

SEQ ID NO: 4319 - DNA, 22 bp, Artificial Sequence
  Synthetic sequence
taggagccaatctgagccatga

SEQ ID NO: 4320 - DNA, 22 bp, Artificial Sequence
  Synthetic sequence
taggagccaatctgagccatga

SEQ ID NO: 4321 - DNA, 22 bp, Artificial Sequence
  Synthetic sequence
taggagccaatctgagccatga

SEQ ID NO: 4322 - DNA, 22 bp, Artificial Sequence
  Synthetic sequence
taggagccaatctgagccatga

SEQ ID NO: 4323 - DNA, 22 bp, Artificial Sequence
  Synthetic sequence
taggagccaatctgagccatga

SEQ ID NO: 4324 - DNA, 22 bp, Artificial Sequence
  Synthetic sequence
taggagccaatctgagccatga

SEQ ID NO: 4325 - DNA, 22 bp, Artificial Sequence
  Synthetic sequence
taggagccaatctgagccatga

SEQ ID NO: 4326 - DNA, 22 bp, Artificial Sequence
  Synthetic sequence
taggagccaatctgagccatga

SEQ ID NO: 4327 - DNA, 20 bp, Artificial Sequence
  Synthetic sequence
gtcgcttcttctgcaggaac

SEQ ID NO: 4328 - DNA, 20 bp, Artificial Sequence
  Synthetic sequence
gtcgcttcttctgcaggaac

SEQ ID NO: 4329 - DNA, 20 bp, Artificial Sequence
  Synthetic sequence
gtcgcttcttctgcaggaac

SEQ ID NO: 4330 - DNA, 20 bp, Artificial Sequence
  Synthetic sequence
gtcgcttcttctgcaggaac

SEQ ID NO: 4331 - DNA, 20 bp, Artificial Sequence
  Synthetic sequence
gtcgcttcttctgcaggaac

SEQ ID NO: 4332 - DNA, 20 bp, Artificial Sequence
  Synthetic sequence
gtcgcttcttctgcaggaac

SEQ ID NO: 4333 - DNA, 20 bp, Artificial Sequence
  Synthetic sequence
gtcgcttcttctgcaggaac

SEQ ID NO: 4334 - DNA, 20 bp, Artificial Sequence
  Synthetic sequence
gtcgcttcttctgcaggaac

SEQ ID NO: 4335 - DNA, 20 bp, Artificial Sequence
  Synthetic sequence
gtcgcttcttctgcaggaac

SEQ ID NO: 4336 - DNA, 20 bp, Artificial Sequence
  Synthetic sequence
gtcgcttcttctgcaggaac

SEQ ID NO: 4337 - DNA, 20 bp, Artificial Sequence
  Synthetic sequence
gtcgcttcttctgcaggaac

SEQ ID NO: 4338 - DNA, 20 bp, Artificial Sequence
  Synthetic sequence
gtcgcttcttctgcaggaac

SEQ ID NO: 4339 - DNA, 20 bp, Artificial Sequence
  Synthetic sequence
gtcgcttcttctgcaggaac

SEQ ID NO: 4340 - DNA, 20 bp, Artificial Sequence
  Synthetic sequence
gtcgcttcttctgcaggaac

SEQ ID NO: 4341 - DNA, 20 bp, Artificial Sequence
  Synthetic sequence
gtcgcttcttctgcaggaac

SEQ ID NO: 4342 - DNA, 20 bp, Artificial Sequence
  Synthetic sequence
gtcgcttcttctgcaggaac

SEQ ID NO: 4343 - DNA, 20 bp, Artificial Sequence
  Synthetic sequence
gtcgcttcttctgcaggaac

SEQ ID NO: 4344 - DNA, 20 bp, Artificial Sequence
  Synthetic sequence
gtcgcttcttctgcaggaac

SEQ ID NO: 4345 - DNA, 20 bp, Artificial Sequence
  Synthetic sequence
gtcgcttcttctgcaggaac

SEQ ID NO: 4346 - DNA, 20 bp, Artificial Sequence
  Synthetic sequence
gtcgcttcttctgcaggaac

SEQ ID NO: 4347 - DNA, 20 bp, Artificial Sequence
  Synthetic sequence
gtcgcttcttctgcaggaac

SEQ ID NO: 4348 - DNA, 20 bp, Artificial Sequence
  Synthetic sequence
gtcgcttcttctgcaggaac

SEQ ID NO: 4349 - DNA, 19 bp, Artificial Sequence
  Synthetic sequence
gtcgcttcttctgcaggaa

SEQ ID NO: 4350 - DNA, 19 bp, Artificial Sequence
  Synthetic sequence
gtcgcttcttctgcaggaa

SEQ ID NO: 4351 - DNA, 19 bp, Artificial Sequence
  Synthetic sequence
gtcgcttcttctgcaggaa

SEQ ID NO: 4352 - DNA, 19 bp, Artificial Sequence
  Synthetic sequence
gtcgcttcttctgcaggaa

SEQ ID NO: 4353 - DNA, 19 bp, Artificial Sequence
  Synthetic sequence
gtcgcttcttctgcaggaa

SEQ ID NO: 4354 - DNA, 19 bp, Artificial Sequence
  Synthetic sequence
tcgcttcttctgcaggaac

SEQ ID NO: 4355 - DNA, 19 bp, Artificial Sequence
  Synthetic sequence
tcgcttcttctgcaggaac

SEQ ID NO: 4356 - DNA, 19 bp, Artificial Sequence
  Synthetic sequence
tcgcttcttctgcaggaac

SEQ ID NO: 4357 - DNA, 19 bp, Artificial Sequence
  Synthetic sequence
tcgcttcttctgcaggaac

SEQ ID NO: 4358 - DNA, 19 bp, Artificial Sequence
  Synthetic sequence
tcgcttcttctgcaggaac

SEQ ID NO: 4359 - DNA, 20 bp, Artificial Sequence
  Synthetic sequence
gtcgcttcttctgcaggaac

SEQ ID NO: 4360 - DNA, 20 bp, Artificial Sequence
  Synthetic sequence
gtcgcttcttctgcaggaac

SEQ ID NO: 4361 - DNA, 20 bp, Artificial Sequence
  Synthetic sequence
gtcgcttcttctgcaggaac

SEQ ID NO: 4362 - DNA, 20 bp, Artificial Sequence
  Synthetic sequence
gtcgcttcttctgcaggaac

SEQ ID NO: 4363 - DNA, 20 bp, Artificial Sequence
  Synthetic sequence
gtcgcttcttctgcaggaac

SEQ ID NO: 4364 - DNA, 20 bp, Artificial Sequence
  Synthetic sequence
gtcgcttcttctgcaggaac

SEQ ID NO: 4365 - DNA, 20 bp, Artificial Sequence
  Synthetic sequence
gtcgcttcttctgcaggaac

SEQ ID NO: 4366 - DNA, 20 bp, Artificial Sequence
  Synthetic sequence
gtcgcttcttctgcaggaac

SEQ ID NO: 4367 - DNA, 19 bp, Artificial Sequence
  Synthetic sequence
gtcgcttcttctgcaggaa

SEQ ID NO: 4368 - DNA, 19 bp, Artificial Sequence
  Synthetic sequence
gtcgcttcttctgcaggaa

SEQ ID NO: 4369 - DNA, 19 bp, Artificial Sequence
  Synthetic sequence
gtcgcttcttctgcaggaa

SEQ ID NO: 4370 - DNA, 19 bp, Artificial Sequence
  Synthetic sequence
gtcgcttcttctgcaggaa

SEQ ID NO: 4371 - DNA, 20 bp, Artificial Sequence
  Synthetic sequence
gtcgcttcttctgcaggaac

SEQ ID NO: 4372 - DNA, 20 bp, Artificial Sequence
  Synthetic sequence
gtcgcttcttctgcaggaac

SEQ ID NO: 4373 - DNA, 20 bp, Artificial Sequence
  Synthetic sequence
gtcgcttcttctgcaggaac

SEQ ID NO: 4374 - DNA, 18 bp, Artificial Sequence
  Synthetic sequence
gtcgcttcttctgcagga

SEQ ID NO: 4375 - DNA, 18 bp, Artificial Sequence
  Synthetic sequence
gtcgcttcttctgcagga

SEQ ID NO: 4376 - DNA, 18 bp, Artificial Sequence
  Synthetic sequence
gtcgcttcttctgcagga

SEQ ID NO: 4377 - DNA, 18 bp, Artificial Sequence
  Synthetic sequence
gtcgcttcttctgcagga

SEQ ID NO: 4378 - DNA, 18 bp, Artificial Sequence
  Synthetic sequence
cgcttcttctgcaggaac

SEQ ID NO: 4379 - DNA, 18 bp, Artificial Sequence
  Synthetic sequence
cgcttcttctgcaggaac

SEQ ID NO: 4380 - DNA, 18 bp, Artificial Sequence
  Synthetic sequence
cgcttcttctgcaggaac

SEQ ID NO: 4381 - DNA, 18 bp, Artificial Sequence
  Synthetic sequence
cgcttcttctgcaggaac

SEQ ID NO: 4382 - DNA, 20 bp, Artificial Sequence
  Synthetic sequence
gtcgcttcttctgcaggaac

SEQ ID NO: 4383 - DNA, 20 bp, Artificial Sequence
  Synthetic sequence
gtcgcttcttctgcaggaac

SEQ ID NO: 4384 - DNA, 20 bp, Artificial Sequence
  Synthetic sequence
gtcgcttcttctgcaggaac

SEQ ID NO: 4385 - DNA, 20 bp, Artificial Sequence
  Synthetic sequence
gtcgcttcttctgcaggaac

SEQ ID NO: 4386 - DNA, 20 bp, Artificial Sequence
  Synthetic sequence
gtcgcttcttctgcaggaac

SEQ ID NO: 4387 - DNA, 20 bp, Artificial Sequence
  Synthetic sequence
gtcgcttcttctgcaggaac

SEQ ID NO: 4388 - DNA, 19 bp, Artificial Sequence
  Synthetic sequence
gtcgcttcttctgcaggaa

SEQ ID NO: 4389 - DNA, 19 bp, Artificial Sequence
  Synthetic sequence
gtcgcttcttctgcaggaa

SEQ ID NO: 4390 - DNA, 19 bp, Artificial Sequence
  Synthetic sequence
gtcgcttcttctgcaggaa

SEQ ID NO: 4391 - DNA, 19 bp, Artificial Sequence
  Synthetic sequence
tcgcttcttctgcaggaac

SEQ ID NO: 4392 - DNA, 19 bp, Artificial Sequence
  Synthetic sequence
tcgcttcttctgcaggaac

SEQ ID NO: 4393 - DNA, 19 bp, Artificial Sequence
  Synthetic sequence
tcgcttcttctgcaggaac

SEQ ID NO: 4394 - DNA, 18 bp, Artificial Sequence
  Synthetic sequence
gtcgcttcttctgcagga

SEQ ID NO: 4395 - DNA, 18 bp, Artificial Sequence
  Synthetic sequence
gtcgcttcttctgcagga

SEQ ID NO: 4396 - DNA, 18 bp, Artificial Sequence
  Synthetic sequence
gtcgcttcttctgcagga

SEQ ID NO: 4397 - DNA, 18 bp, Artificial Sequence
  Synthetic sequence
cgcttcttctgcaggaac

SEQ ID NO: 4398 - DNA, 18 bp, Artificial Sequence
  Synthetic sequence
cgcttcttctgcaggaac

SEQ ID NO: 4399 - DNA, 18 bp, Artificial Sequence
  Synthetic sequence
cgcttcttctgcaggaac

SEQ ID NO: 4400 - DNA, 17 bp, Artificial Sequence
  Synthetic sequence
gtcgcttcttctgcagg

SEQ ID NO: 4401 - DNA, 17 bp, Artificial Sequence
  Synthetic sequence
gtcgcttcttctgcagg

SEQ ID NO: 4402 - DNA, 17 bp, Artificial Sequence
  Synthetic sequence
gtcgcttcttctgcagg

SEQ ID NO: 4403 - DNA, 17 bp, Artificial Sequence
  Synthetic sequence
gcttcttctgcaggaac

SEQ ID NO: 4404 - DNA, 17 bp, Artificial Sequence
  Synthetic sequence
gcttcttctgcaggaac

SEQ ID NO: 4405 - DNA, 17 bp, Artificial Sequence
  Synthetic sequence
gcttcttctgcaggaac

SEQ ID NO: 4406 - DNA, 19 bp, Artificial Sequence
  Synthetic sequence
tcgcttcttctgcaggaac

SEQ ID NO: 4407 - DNA, 19 bp, Artificial Sequence
  Synthetic sequence
tcgcttcttctgcaggaac

SEQ ID NO: 4408 - DNA, 19 bp, Artificial Sequence
  Synthetic sequence
gtcgcttcttctgcaggaa

SEQ ID NO: 4409 - DNA, 19 bp, Artificial Sequence
  Synthetic sequence
gtcgcttcttctgcaggaa

SEQ ID NO: 4410 - DNA, 18 bp, Artificial Sequence
  Synthetic sequence
tcgcttcttctgcaggaa

SEQ ID NO: 4411 - DNA, 18 bp, Artificial Sequence
  Synthetic sequence
tcgcttcttctgcaggaa

SEQ ID NO: 4412 - DNA, 18 bp, Artificial Sequence
  Synthetic sequence
tcgcttcttctgcaggaa

SEQ ID NO: 4413 - DNA, 18 bp, Artificial Sequence
  Synthetic sequence
tcgcttcttctgcaggaa

SEQ ID NO: 4414 - DNA, 17 bp, Artificial Sequence
  Synthetic sequence
tcgcttcttctgcagga

SEQ ID NO: 4415 - DNA, 17 bp, Artificial Sequence
  Synthetic sequence
tcgcttcttctgcagga

SEQ ID NO: 4416 - DNA, 17 bp, Artificial Sequence
  Synthetic sequence
tcgcttcttctgcagga

SEQ ID NO: 4417 - DNA, 20 bp, Artificial Sequence
  Synthetic sequence
gtcgcttcttctgcaggaac

SEQ ID NO: 4418 - DNA, 20 bp, Artificial Sequence
  Synthetic sequence
gtcgcttcttctgcaggaac

SEQ ID NO: 4419 - DNA, 20 bp, Artificial Sequence
  Synthetic sequence
gtcgcttcttctgcaggaac

SEQ ID NO: 4420 - DNA, 20 bp, Artificial Sequence
  Synthetic sequence
gtcgcttcttctgcaggaac

SEQ ID NO: 4421 - DNA, 19 bp, Artificial Sequence
  Synthetic sequence
gtcgcttcttctgcaggaa

SEQ ID NO: 4422 - DNA, 19 bp, Artificial Sequence
  Synthetic sequence
tcgcttcttctgcaggaac

SEQ ID NO: 4423 - DNA, 20 bp, Artificial Sequence
  Synthetic sequence
gtcgcttcttctgcaggaac

SEQ ID NO: 4424 - DNA, 20 bp, Artificial Sequence
  Synthetic sequence
gtcgcttcttctgcaggaac

SEQ ID NO: 4425 - DNA, 19 bp, Artificial Sequence
  Synthetic sequence
gtcgcttcttctgcaggaa

SEQ ID NO: 4426 - DNA, 20 bp, Artificial Sequence
  Synthetic sequence
gtcgcttcttctgcaggaac

SEQ ID NO: 4427 - DNA, 18 bp, Artificial Sequence
  Synthetic sequence
gtcgcttcttctgcagga

SEQ ID NO: 4428 - DNA, 18 bp, Artificial Sequence
  Synthetic sequence
cgcttcttctgcaggaac

SEQ ID NO: 4429 - DNA, 20 bp, Artificial Sequence
  Synthetic sequence
gtcgcttcttctgcaggaac

SEQ ID NO: 4430 - DNA, 19 bp, Artificial Sequence
  Synthetic sequence
gtcgcttcttctgcaggaa

SEQ ID NO: 4431 - DNA, 18 bp, Artificial Sequence
  Synthetic sequence
gtcgcttcttctgcagga

SEQ ID NO: 4432 - DNA, 18 bp, Artificial Sequence
  Synthetic sequence
cgcttcttctgcaggaac

SEQ ID NO: 4433 - DNA, 17 bp, Artificial Sequence
  Synthetic sequence
gtcgcttcttctgcagg

SEQ ID NO: 4434 - DNA, 17 bp, Artificial Sequence
  Synthetic sequence
gcttcttctgcaggaac

SEQ ID NO: 4435 - DNA, 19 bp, Artificial Sequence
  Synthetic sequence
tcgcttcttctgcaggaac

SEQ ID NO: 4436 - DNA, 18 bp, Artificial Sequence
  Synthetic sequence
tcgcttcttctgcaggaa

SEQ ID NO: 4437 - DNA, 17 bp, Artificial Sequence
  Synthetic sequence
tcgcttcttctgcagga

SEQ ID NO: 4438 - DNA, 20 bp, Artificial Sequence
  Synthetic sequence
gtcgcttcttctgcaggaac

SEQ ID NO: 4439 - DNA, 20 bp, Artificial Sequence
  Synthetic sequence
gtcgcttcttctgcaggaac

SEQ ID NO: 4440 - DNA, 20 bp, Artificial Sequence
  Synthetic sequence
gtcgcttcttctgcaggaac

SEQ ID NO: 4441 - DNA, 20 bp, Artificial Sequence
  Synthetic sequence
gtcgcttcttctgcaggaac

SEQ ID NO: 4442 - DNA, 20 bp, Artificial Sequence
  Synthetic sequence
gtcgcttcttctgcaggaac

SEQ ID NO: 4443 - DNA, 20 bp, Artificial Sequence
  Synthetic sequence
gtcgcttcttctgcaggaac

SEQ ID NO: 4444 - DNA, 20 bp, Artificial Sequence
  Synthetic sequence
gtcgcttcttctgcaggaac

SEQ ID NO: 4445 - DNA, 20 bp, Artificial Sequence
  Synthetic sequence
gtcgcttcttctgcaggaac

SEQ ID NO: 4446 - DNA, 20 bp, Artificial Sequence
  Synthetic sequence
gtcgcttcttctgcaggaac

SEQ ID NO: 4447 - DNA, 20 bp, Artificial Sequence
  Synthetic sequence
gtcgcttcttctgcaggaac

SEQ ID NO: 4448 - DNA, 20 bp, Artificial Sequence
  Synthetic sequence
gtcgcttcttctgcaggaac

SEQ ID NO: 4449 - DNA, 20 bp, Artificial Sequence
  Synthetic sequence
gtcgcttcttctgcaggaac

SEQ ID NO: 4450 - DNA, 20 bp, Artificial Sequence
  Synthetic sequence
gtcgcttcttctgcaggaac

SEQ ID NO: 4451 - DNA, 20 bp, Artificial Sequence
  Synthetic sequence
gtcgcttcttctgcaggaac

SEQ ID NO: 4452 - DNA, 20 bp, Artificial Sequence
  Synthetic sequence
gtcgcttcttctgcaggaac

SEQ ID NO: 4453 - DNA, 21 bp, Artificial Sequence
  Synthetic sequence
gtcgcttcttctgcaggaaca

SEQ ID NO: 4454 - DNA, 21 bp, Artificial Sequence
  Synthetic sequence
gtcgcttcttctgcaggaaca

SEQ ID NO: 4455 - DNA, 21 bp, Artificial Sequence
  Synthetic sequence
gtcgcttcttctgcaggaaca

SEQ ID NO: 4456 - DNA, 21 bp, Artificial Sequence
  Synthetic sequence
gtcgcttcttctgcaggaaca

SEQ ID NO: 4457 - DNA, 21 bp, Artificial Sequence
  Synthetic sequence
gtcgcttcttctgcaggaaca

SEQ ID NO: 4458 - DNA, 21 bp, Artificial Sequence
  Synthetic sequence
gtcgcttcttctgcaggaaca

SEQ ID NO: 4459 - DNA, 21 bp, Artificial Sequence
  Synthetic sequence
gtcgcttcttctgcaggaaca

SEQ ID NO: 4460 - DNA, 21 bp, Artificial Sequence
  Synthetic sequence
gtcgcttcttctgcaggaaca

SEQ ID NO: 4461 - DNA, 21 bp, Artificial Sequence
  Synthetic sequence
gtcgcttcttctgcaggaaca

SEQ ID NO: 4462 - DNA, 21 bp, Artificial Sequence
  Synthetic sequence
gtcgcttcttctgcaggaaca

SEQ ID NO: 4463 - DNA, 21 bp, Artificial Sequence
  Synthetic sequence
gtcgcttcttctgcaggaaca

SEQ ID NO: 4464 - DNA, 21 bp, Artificial Sequence
  Synthetic sequence
gtcgcttcttctgcaggaaca

SEQ ID NO: 4465 - DNA, 21 bp, Artificial Sequence
  Synthetic sequence
gtcgcttcttctgcaggaaca

SEQ ID NO: 4466 - DNA, 21 bp, Artificial Sequence
  Synthetic sequence
gtcgcttcttctgcaggaaca

SEQ ID NO: 4467 - DNA, 21 bp, Artificial Sequence
  Synthetic sequence
gtcgcttcttctgcaggaaca

SEQ ID NO: 4468 - DNA, 21 bp, Artificial Sequence
  Synthetic sequence
gtcgcttcttctgcaggaaca

SEQ ID NO: 4469 - DNA, 22 bp, Artificial Sequence
  Synthetic sequence
gtcgcttcttctgcaggaacat

SEQ ID NO: 4470 - DNA, 22 bp, Artificial Sequence
  Synthetic sequence
gtcgcttcttctgcaggaacat

SEQ ID NO: 4471 - DNA, 22 bp, Artificial Sequence
  Synthetic sequence
gtcgcttcttctgcaggaacat

SEQ ID NO: 4472 - DNA, 22 bp, Artificial Sequence
  Synthetic sequence
gtcgcttcttctgcaggaacat

SEQ ID NO: 4473 - DNA, 22 bp, Artificial Sequence
  Synthetic sequence
gtcgcttcttctgcaggaacat

SEQ ID NO: 4474 - DNA, 22 bp, Artificial Sequence
  Synthetic sequence
gtcgcttcttctgcaggaacat

SEQ ID NO: 4475 - DNA, 22 bp, Artificial Sequence
  Synthetic sequence
gtcgcttcttctgcaggaacat

SEQ ID NO: 4476 - DNA, 22 bp, Artificial Sequence
  Synthetic sequence
gtcgcttcttctgcaggaacat

SEQ ID NO: 4477 - DNA, 22 bp, Artificial Sequence
  Synthetic sequence
gtcgcttcttctgcaggaacat

SEQ ID NO: 4478 - DNA, 22 bp, Artificial Sequence
  Synthetic sequence
gtcgcttcttctgcaggaacat

SEQ ID NO: 4479 - DNA, 22 bp, Artificial Sequence
  Synthetic sequence
gtcgcttcttctgcaggaacat

SEQ ID NO: 4480 - DNA, 22 bp, Artificial Sequence
  Synthetic sequence
gtcgcttcttctgcaggaacat

SEQ ID NO: 4481 - DNA, 22 bp, Artificial Sequence
  Synthetic sequence
gtcgcttcttctgcaggaacat

SEQ ID NO: 4482 - DNA, 22 bp, Artificial Sequence
  Synthetic sequence
gtcgcttcttctgcaggaacat

SEQ ID NO: 4483 - DNA, 22 bp, Artificial Sequence
  Synthetic sequence
gtcgcttcttctgcaggaacat

SEQ ID NO: 4484 - DNA, 22 bp, Artificial Sequence
  Synthetic sequence
gtcgcttcttctgcaggaacat

SEQ ID NO: 4485 - DNA, 23 bp, Artificial Sequence
  Synthetic sequence
gtcgcttcttctgcaggaacata

SEQ ID NO: 4486 - DNA, 23 bp, Artificial Sequence
  Synthetic sequence
gtcgcttcttctgcaggaacata

SEQ ID NO: 4487 - DNA, 23 bp, Artificial Sequence
  Synthetic sequence
gtcgcttcttctgcaggaacata

SEQ ID NO: 4488 - DNA, 23 bp, Artificial Sequence
  Synthetic sequence
gtcgcttcttctgcaggaacata

SEQ ID NO: 4489 - DNA, 23 bp, Artificial Sequence
  Synthetic sequence
gtcgcttcttctgcaggaacata

SEQ ID NO: 4490 - DNA, 23 bp, Artificial Sequence
  Synthetic sequence
gtcgcttcttctgcaggaacata

SEQ ID NO: 4491 - DNA, 23 bp, Artificial Sequence
  Synthetic sequence
gtcgcttcttctgcaggaacata

SEQ ID NO: 4492 - DNA, 23 bp, Artificial Sequence
  Synthetic sequence
gtcgcttcttctgcaggaacata

SEQ ID NO: 4493 - DNA, 23 bp, Artificial Sequence
  Synthetic sequence
gtcgcttcttctgcaggaacata

SEQ ID NO: 4494 - DNA, 23 bp, Artificial Sequence
  Synthetic sequence
gtcgcttcttctgcaggaacata

SEQ ID NO: 4495 - DNA, 23 bp, Artificial Sequence
  Synthetic sequence
gtcgcttcttctgcaggaacata

SEQ ID NO: 4496 - DNA, 23 bp, Artificial Sequence
  Synthetic sequence
gtcgcttcttctgcaggaacata

SEQ ID NO: 4497 - DNA, 23 bp, Artificial Sequence
  Synthetic sequence
gtcgcttcttctgcaggaacata

SEQ ID NO: 4498 - DNA, 23 bp, Artificial Sequence
  Synthetic sequence
gtcgcttcttctgcaggaacata

SEQ ID NO: 4499 - DNA, 23 bp, Artificial Sequence
  Synthetic sequence
gtcgcttcttctgcaggaacata

SEQ ID NO: 4500 - DNA, 23 bp, Artificial Sequence
  Synthetic sequence
gtcgcttcttctgcaggaacata

SEQ ID NO: 4501 - DNA, 21 bp, Artificial Sequence
  Synthetic sequence
gtcgcttcttctgcaggaaca

SEQ ID NO: 4502 - DNA, 21 bp, Artificial Sequence
  Synthetic sequence
gtcgcttcttctgcaggaaca

SEQ ID NO: 4503 - DNA, 21 bp, Artificial Sequence
  Synthetic sequence
gtcgcttcttctgcaggaaca

SEQ ID NO: 4504 - DNA, 21 bp, Artificial Sequence
  Synthetic sequence
gtcgcttcttctgcaggaaca

SEQ ID NO: 4505 - DNA, 21 bp, Artificial Sequence
  Synthetic sequence
gtcgcttcttctgcaggaaca

SEQ ID NO: 4506 - DNA, 21 bp, Artificial Sequence
  Synthetic sequence
gtcgcttcttctgcaggaaca

SEQ ID NO: 4507 - DNA, 21 bp, Artificial Sequence
  Synthetic sequence
gtcgcttcttctgcaggaaca

SEQ ID NO: 4508 - DNA, 21 bp, Artificial Sequence
  Synthetic sequence
gtcgcttcttctgcaggaaca

SEQ ID NO: 4509 - DNA, 21 bp, Artificial Sequence
  Synthetic sequence
gtcgcttcttctgcaggaaca

SEQ ID NO: 4510 - DNA, 21 bp, Artificial Sequence
  Synthetic sequence
gtcgcttcttctgcaggaaca

SEQ ID NO: 4511 - DNA, 21 bp, Artificial Sequence
  Synthetic sequence
gtcgcttcttctgcaggaaca

SEQ ID NO: 4512 - DNA, 21 bp, Artificial Sequence
  Synthetic sequence
gtcgcttcttctgcaggaaca

SEQ ID NO: 4513 - DNA, 21 bp, Artificial Sequence
  Synthetic sequence
gtcgcttcttctgcaggaaca

SEQ ID NO: 4514 - DNA, 21 bp, Artificial Sequence
  Synthetic sequence
gtcgcttcttctgcaggaaca

SEQ ID NO: 4515 - DNA, 21 bp, Artificial Sequence
  Synthetic sequence
gtcgcttcttctgcaggaaca

SEQ ID NO: 4516 - DNA, 21 bp, Artificial Sequence
  Synthetic sequence
gtcgcttcttctgcaggaaca

SEQ ID NO: 4517 - DNA, 22 bp, Artificial Sequence
  Synthetic sequence
gtcgcttcttctgcaggaacat

SEQ ID NO: 4518 - DNA, 22 bp, Artificial Sequence
  Synthetic sequence
gtcgcttcttctgcaggaacat

SEQ ID NO: 4519 - DNA, 22 bp, Artificial Sequence
  Synthetic sequence
gtcgcttcttctgcaggaacat

SEQ ID NO: 4520 - DNA, 22 bp, Artificial Sequence
  Synthetic sequence
gtcgcttcttctgcaggaacat

SEQ ID NO: 4521 - DNA, 22 bp, Artificial Sequence
  Synthetic sequence
gtcgcttcttctgcaggaacat

SEQ ID NO: 4522 - DNA, 22 bp, Artificial Sequence
  Synthetic sequence
gtcgcttcttctgcaggaacat

SEQ ID NO: 4523 - DNA, 22 bp, Artificial Sequence
  Synthetic sequence
gtcgcttcttctgcaggaacat

SEQ ID NO: 4524 - DNA, 22 bp, Artificial Sequence
  Synthetic sequence
gtcgcttcttctgcaggaacat

SEQ ID NO: 4525 - DNA, 22 bp, Artificial Sequence
  Synthetic sequence
gtcgcttcttctgcaggaacat

SEQ ID NO: 4526 - DNA, 22 bp, Artificial Sequence
  Synthetic sequence
gtcgcttcttctgcaggaacat

SEQ ID NO: 4527 - DNA, 22 bp, Artificial Sequence
  Synthetic sequence
gtcgcttcttctgcaggaacat

SEQ ID NO: 4528 - DNA, 22 bp, Artificial Sequence
  Synthetic sequence
gtcgcttcttctgcaggaacat

SEQ ID NO: 4529 - DNA, 22 bp, Artificial Sequence
  Synthetic sequence
gtcgcttcttctgcaggaacat

SEQ ID NO: 4530 - DNA, 22 bp, Artificial Sequence
  Synthetic sequence
gtcgcttcttctgcaggaacat

SEQ ID NO: 4531 - DNA, 22 bp, Artificial Sequence
  Synthetic sequence
gtcgcttcttctgcaggaacat

SEQ ID NO: 4532 - DNA, 22 bp, Artificial Sequence
  Synthetic sequence
gtcgcttcttctgcaggaacat

SEQ ID NO: 4533 - DNA, 20 bp, Artificial Sequence
  Synthetic sequence
tgtcgcttcttctgcaggaa

SEQ ID NO: 4534 - DNA, 20 bp, Artificial Sequence
  Synthetic sequence
tgtcgcttcttctgcaggaa

SEQ ID NO: 4535 - DNA, 20 bp, Artificial Sequence
  Synthetic sequence
tgtcgcttcttctgcaggaa

SEQ ID NO: 4536 - DNA, 20 bp, Artificial Sequence
  Synthetic sequence
tgtcgcttcttctgcaggaa

SEQ ID NO: 4537 - DNA, 20 bp, Artificial Sequence
  Synthetic sequence
tgtcgcttcttctgcaggaa

SEQ ID NO: 4538 - DNA, 20 bp, Artificial Sequence
  Synthetic sequence
tgtcgcttcttctgcaggaa

SEQ ID NO: 4539 - DNA, 20 bp, Artificial Sequence
  Synthetic sequence
tgtcgcttcttctgcaggaa

SEQ ID NO: 4540 - DNA, 20 bp, Artificial Sequence
  Synthetic sequence
tgtcgcttcttctgcaggaa

SEQ ID NO: 4541 - DNA, 20 bp, Artificial Sequence
  Synthetic sequence
tgtcgcttcttctgcaggaa

SEQ ID NO: 4542 - DNA, 20 bp, Artificial Sequence
  Synthetic sequence
tgtcgcttcttctgcaggaa

SEQ ID NO: 4543 - DNA, 20 bp, Artificial Sequence
  Synthetic sequence
tgtcgcttcttctgcaggaa

SEQ ID NO: 4544 - DNA, 20 bp, Artificial Sequence
  Synthetic sequence
tgtcgcttcttctgcaggaa

SEQ ID NO: 4545 - DNA, 20 bp, Artificial Sequence
  Synthetic sequence
tgtcgcttcttctgcaggaa

SEQ ID NO: 4546 - DNA, 20 bp, Artificial Sequence
  Synthetic sequence
tgtcgcttcttctgcaggaa

SEQ ID NO: 4547 - DNA, 20 bp, Artificial Sequence
  Synthetic sequence
tgtcgcttcttctgcaggaa

SEQ ID NO: 4548 - DNA, 20 bp, Artificial Sequence
  Synthetic sequence
tgtcgcttcttctgcaggaa

SEQ ID NO: 4549 - DNA, 20 bp, Artificial Sequence
  Synthetic sequence
tgtcgcttcttctgcaggaa

SEQ ID NO: 4550 - DNA, 20 bp, Artificial Sequence
  Synthetic sequence
tgtcgcttcttctgcaggaa

SEQ ID NO: 4551 - DNA, 20 bp, Artificial Sequence
  Synthetic sequence
tgtcgcttcttctgcaggaa

SEQ ID NO: 4552 - DNA, 20 bp, Artificial Sequence
  Synthetic sequence
tgtcgcttcttctgcaggaa

SEQ ID NO: 4553 - DNA, 20 bp, Artificial Sequence
  Synthetic sequence
tgtcgcttcttctgcaggaa

SEQ ID NO: 4554 - DNA, 20 bp, Artificial Sequence
  Synthetic sequence
tgtcgcttcttctgcaggaa

SEQ ID NO: 4555 - DNA, 19 bp, Artificial Sequence
  Synthetic sequence
tgtcgcttcttctgcagga

SEQ ID NO: 4556 - DNA, 19 bp, Artificial Sequence
  Synthetic sequence
tgtcgcttcttctgcagga

SEQ ID NO: 4557 - DNA, 19 bp, Artificial Sequence
  Synthetic sequence
tgtcgcttcttctgcagga

SEQ ID NO: 4558 - DNA, 19 bp, Artificial Sequence
  Synthetic sequence
tgtcgcttcttctgcagga

SEQ ID NO: 4559 - DNA, 19 bp, Artificial Sequence
  Synthetic sequence
tgtcgcttcttctgcagga

SEQ ID NO: 4560 - DNA, 19 bp, Artificial Sequence
  Synthetic sequence
gtcgcttcttctgcaggaa

SEQ ID NO: 4561 - DNA, 19 bp, Artificial Sequence
  Synthetic sequence
gtcgcttcttctgcaggaa

SEQ ID NO: 4562 - DNA, 19 bp, Artificial Sequence
  Synthetic sequence
gtcgcttcttctgcaggaa

SEQ ID NO: 4563 - DNA, 19 bp, Artificial Sequence
  Synthetic sequence
gtcgcttcttctgcaggaa

SEQ ID NO: 4564 - DNA, 19 bp, Artificial Sequence
  Synthetic sequence
gtcgcttcttctgcaggaa

SEQ ID NO: 4565 - DNA, 20 bp, Artificial Sequence
  Synthetic sequence
tgtcgcttcttctgcaggaa

SEQ ID NO: 4566 - DNA, 20 bp, Artificial Sequence
  Synthetic sequence
tgtcgcttcttctgcaggaa

SEQ ID NO: 4567 - DNA, 20 bp, Artificial Sequence
  Synthetic sequence
tgtcgcttcttctgcaggaa

SEQ ID NO: 4568 - DNA, 20 bp, Artificial Sequence
  Synthetic sequence
tgtcgcttcttctgcaggaa

SEQ ID NO: 4569 - DNA, 20 bp, Artificial Sequence
  Synthetic sequence
tgtcgcttcttctgcaggaa

SEQ ID NO: 4570 - DNA, 20 bp, Artificial Sequence
  Synthetic sequence
tgtcgcttcttctgcaggaa

SEQ ID NO: 4571 - DNA, 20 bp, Artificial Sequence
  Synthetic sequence
tgtcgcttcttctgcaggaa

SEQ ID NO: 4572 - DNA, 20 bp, Artificial Sequence
  Synthetic sequence
tgtcgcttcttctgcaggaa

SEQ ID NO: 4573 - DNA, 19 bp, Artificial Sequence
  Synthetic sequence
tgtcgcttcttctgcagga

SEQ ID NO: 4574 - DNA, 19 bp, Artificial Sequence
  Synthetic sequence
tgtcgcttcttctgcagga

SEQ ID NO: 4575 - DNA, 19 bp, Artificial Sequence
  Synthetic sequence
tgtcgcttcttctgcagga

SEQ ID NO: 4576 - DNA, 19 bp, Artificial Sequence
  Synthetic sequence
tgtcgcttcttctgcagga

SEQ ID NO: 4577 - DNA, 20 bp, Artificial Sequence
  Synthetic sequence
tgtcgcttcttctgcaggaa

SEQ ID NO: 4578 - DNA, 20 bp, Artificial Sequence
  Synthetic sequence
tgtcgcttcttctgcaggaa

SEQ ID NO: 4579 - DNA, 20 bp, Artificial Sequence
  Synthetic sequence
tgtcgcttcttctgcaggaa

SEQ ID NO: 4580 - DNA, 18 bp, Artificial Sequence
  Synthetic sequence
tgtcgcttcttctgcagg

SEQ ID NO: 4581 - DNA, 18 bp, Artificial Sequence
  Synthetic sequence
tgtcgcttcttctgcagg

SEQ ID NO: 4582 - DNA, 18 bp, Artificial Sequence
  Synthetic sequence
tgtcgcttcttctgcagg

SEQ ID NO: 4583 - DNA, 18 bp, Artificial Sequence
  Synthetic sequence
tgtcgcttcttctgcagg

SEQ ID NO: 4584 - DNA, 18 bp, Artificial Sequence
  Synthetic sequence
tcgcttcttctgcaggaa

SEQ ID NO: 4585 - DNA, 18 bp, Artificial Sequence
  Synthetic sequence
tcgcttcttctgcaggaa

SEQ ID NO: 4586 - DNA, 18 bp, Artificial Sequence
  Synthetic sequence
tcgcttcttctgcaggaa

SEQ ID NO: 4587 - DNA, 18 bp, Artificial Sequence
  Synthetic sequence
tcgcttcttctgcaggaa

SEQ ID NO: 4588 - DNA, 20 bp, Artificial Sequence
  Synthetic sequence
tgtcgcttcttctgcaggaa

SEQ ID NO: 4589 - DNA, 20 bp, Artificial Sequence
  Synthetic sequence
tgtcgcttcttctgcaggaa

SEQ ID NO: 4590 - DNA, 20 bp, Artificial Sequence
  Synthetic sequence
tgtcgcttcttctgcaggaa

SEQ ID NO: 4591 - DNA, 20 bp, Artificial Sequence
  Synthetic sequence
tgtcgcttcttctgcaggaa

SEQ ID NO: 4592 - DNA, 20 bp, Artificial Sequence
  Synthetic sequence
tgtcgcttcttctgcaggaa

SEQ ID NO: 4593 - DNA, 20 bp, Artificial Sequence
  Synthetic sequence
tgtcgcttcttctgcaggaa

SEQ ID NO: 4594 - DNA, 19 bp, Artificial Sequence
  Synthetic sequence
tgtcgcttcttctgcagga

SEQ ID NO: 4595 - DNA, 19 bp, Artificial Sequence
  Synthetic sequence
tgtcgcttcttctgcagga

SEQ ID NO: 4596 - DNA, 19 bp, Artificial Sequence
  Synthetic sequence
tgtcgcttcttctgcagga

SEQ ID NO: 4597 - DNA, 19 bp, Artificial Sequence
  Synthetic sequence
gtcgcttcttctgcaggaa

SEQ ID NO: 4598 - DNA, 19 bp, Artificial Sequence
  Synthetic sequence
gtcgcttcttctgcaggaa

SEQ ID NO: 4599 - DNA, 19 bp, Artificial Sequence
  Synthetic sequence
gtcgcttcttctgcaggaa

SEQ ID NO: 4600 - DNA, 18 bp, Artificial Sequence
  Synthetic sequence
tgtcgcttcttctgcagg

SEQ ID NO: 4601 - DNA, 18 bp, Artificial Sequence
  Synthetic sequence
tgtcgcttcttctgcagg

SEQ ID NO: 4602 - DNA, 18 bp, Artificial Sequence
  Synthetic sequence
tgtcgcttcttctgcagg

SEQ ID NO: 4603 - DNA, 18 bp, Artificial Sequence
  Synthetic sequence
tcgcttcttctgcaggaa

SEQ ID NO: 4604 - DNA, 18 bp, Artificial Sequence
  Synthetic sequence
tcgcttcttctgcaggaa

SEQ ID NO: 4605 - DNA, 18 bp, Artificial Sequence
  Synthetic sequence
tcgcttcttctgcaggaa

SEQ ID NO: 4606 - DNA, 17 bp, Artificial Sequence
  Synthetic sequence
tgtcgcttcttctgcag

SEQ ID NO: 4607 - DNA, 17 bp, Artificial Sequence
  Synthetic sequence
tgtcgcttcttctgcag

SEQ ID NO: 4608 - DNA, 17 bp, Artificial Sequence
  Synthetic sequence
tgtcgcttcttctgcag

SEQ ID NO: 4609 - DNA, 17 bp, Artificial Sequence
  Synthetic sequence
cgcttcttctgcaggaa

SEQ ID NO: 4610 - DNA, 17 bp, Artificial Sequence
  Synthetic sequence
cgcttcttctgcaggaa

SEQ ID NO: 4611 - DNA, 17 bp, Artificial Sequence
  Synthetic sequence
cgcttcttctgcaggaa

SEQ ID NO: 4612 - DNA, 19 bp, Artificial Sequence
  Synthetic sequence
gtcgcttcttctgcaggaa

SEQ ID NO: 4613 - DNA, 19 bp, Artificial Sequence
  Synthetic sequence
gtcgcttcttctgcaggaa

SEQ ID NO: 4614 - DNA, 19 bp, Artificial Sequence
  Synthetic sequence
tgtcgcttcttctgcagga

SEQ ID NO: 4615 - DNA, 19 bp, Artificial Sequence
  Synthetic sequence
tgtcgcttcttctgcagga

SEQ ID NO: 4616 - DNA, 18 bp, Artificial Sequence
  Synthetic sequence
gtcgcttcttctgcagga

SEQ ID NO: 4617 - DNA, 18 bp, Artificial Sequence
  Synthetic sequence
gtcgcttcttctgcagga

SEQ ID NO: 4618 - DNA, 18 bp, Artificial Sequence
  Synthetic sequence
gtcgcttcttctgcagga

SEQ ID NO: 4619 - DNA, 18 bp, Artificial Sequence
  Synthetic sequence
gtcgcttcttctgcagga

SEQ ID NO: 4620 - DNA, 17 bp, Artificial Sequence
  Synthetic sequence
gtcgcttcttctgcagg

SEQ ID NO: 4621 - DNA, 17 bp, Artificial Sequence
  Synthetic sequence
gtcgcttcttctgcagg

SEQ ID NO: 4622 - DNA, 17 bp, Artificial Sequence
  Synthetic sequence
gtcgcttcttctgcagg

SEQ ID NO: 4623 - DNA, 20 bp, Artificial Sequence
  Synthetic sequence
tgtcgcttcttctgcaggaa

SEQ ID NO: 4624 - DNA, 20 bp, Artificial Sequence
  Synthetic sequence
tgtcgcttcttctgcaggaa

SEQ ID NO: 4625 - DNA, 20 bp, Artificial Sequence
  Synthetic sequence
tgtcgcttcttctgcaggaa

SEQ ID NO: 4626 - DNA, 20 bp, Artificial Sequence
  Synthetic sequence
tgtcgcttcttctgcaggaa

SEQ ID NO: 4627 - DNA, 19 bp, Artificial Sequence
  Synthetic sequence
tgtcgcttcttctgcagga

SEQ ID NO: 4628 - DNA, 19 bp, Artificial Sequence
  Synthetic sequence
gtcgcttcttctgcaggaa

SEQ ID NO: 4629 - DNA, 20 bp, Artificial Sequence
  Synthetic sequence
tgtcgcttcttctgcaggaa

SEQ ID NO: 4630 - DNA, 20 bp, Artificial Sequence
  Synthetic sequence
tgtcgcttcttctgcaggaa

SEQ ID NO: 4631 - DNA, 19 bp, Artificial Sequence
  Synthetic sequence
tgtcgcttcttctgcagga

SEQ ID NO: 4632 - DNA, 20 bp, Artificial Sequence
  Synthetic sequence
tgtcgcttcttctgcaggaa

SEQ ID NO: 4633 - DNA, 18 bp, Artificial Sequence
  Synthetic sequence
tgtcgcttcttctgcagg

SEQ ID NO: 4634 - DNA, 18 bp, Artificial Sequence
  Synthetic sequence
tcgcttcttctgcaggaa

SEQ ID NO: 4635 - DNA, 20 bp, Artificial Sequence
  Synthetic sequence
tgtcgcttcttctgcaggaa

SEQ ID NO: 4636 - DNA, 19 bp, Artificial Sequence
  Synthetic sequence
tgtcgcttcttctgcagga

SEQ ID NO: 4637 - DNA, 18 bp, Artificial Sequence
  Synthetic sequence
tgtcgcttcttctgcagg

SEQ ID NO: 4638 - DNA, 18 bp, Artificial Sequence
  Synthetic sequence
tcgcttcttctgcaggaa

SEQ ID NO: 4639 - DNA, 17 bp, Artificial Sequence
  Synthetic sequence
tgtcgcttcttctgcag

SEQ ID NO: 4640 - DNA, 17 bp, Artificial Sequence
  Synthetic sequence
cgcttcttctgcaggaa

SEQ ID NO: 4641 - DNA, 19 bp, Artificial Sequence
  Synthetic sequence
gtcgcttcttctgcaggaa

SEQ ID NO: 4642 - DNA, 18 bp, Artificial Sequence
  Synthetic sequence
gtcgcttcttctgcagga

SEQ ID NO: 4643 - DNA, 17 bp, Artificial Sequence
  Synthetic sequence
gtcgcttcttctgcagg

SEQ ID NO: 4644 - DNA, 20 bp, Artificial Sequence
  Synthetic sequence
tgtcgcttcttctgcaggaa

SEQ ID NO: 4645 - DNA, 20 bp, Artificial Sequence
  Synthetic sequence
tgtcgcttcttctgcaggaa

SEQ ID NO: 4646 - DNA, 20 bp, Artificial Sequence
  Synthetic sequence
tgtcgcttcttctgcaggaa

SEQ ID NO: 4647 - DNA, 20 bp, Artificial Sequence
  Synthetic sequence
tgtcgcttcttctgcaggaa

SEQ ID NO: 4648 - DNA, 20 bp, Artificial Sequence
  Synthetic sequence
tgtcgcttcttctgcaggaa

SEQ ID NO: 4649 - DNA, 20 bp, Artificial Sequence
  Synthetic sequence
tgtcgcttcttctgcaggaa

SEQ ID NO: 4650 - DNA, 20 bp, Artificial Sequence
  Synthetic sequence
tgtcgcttcttctgcaggaa

SEQ ID NO: 4651 - DNA, 20 bp, Artificial Sequence
  Synthetic sequence
tgtcgcttcttctgcaggaa

SEQ ID NO: 4652 - DNA, 20 bp, Artificial Sequence
  Synthetic sequence
tgtcgcttcttctgcaggaa

SEQ ID NO: 4653 - DNA, 20 bp, Artificial Sequence
  Synthetic sequence
tgtcgcttcttctgcaggaa

SEQ ID NO: 4654 - DNA, 20 bp, Artificial Sequence
  Synthetic sequence
tgtcgcttcttctgcaggaa

SEQ ID NO: 4655 - DNA, 20 bp, Artificial Sequence
  Synthetic sequence
tgtcgcttcttctgcaggaa

SEQ ID NO: 4656 - DNA, 20 bp, Artificial Sequence
  Synthetic sequence
tgtcgcttcttctgcaggaa

SEQ ID NO: 4657 - DNA, 20 bp, Artificial Sequence
  Synthetic sequence
tgtcgcttcttctgcaggaa

SEQ ID NO: 4658 - DNA, 20 bp, Artificial Sequence
  Synthetic sequence
tgtcgcttcttctgcaggaa

SEQ ID NO: 4659 - DNA, 21 bp, Artificial Sequence
  Synthetic sequence
tgtcgcttcttctgcaggaac

SEQ ID NO: 4660 - DNA, 21 bp, Artificial Sequence
  Synthetic sequence
tgtcgcttcttctgcaggaac

SEQ ID NO: 4661 - DNA, 21 bp, Artificial Sequence
  Synthetic sequence
tgtcgcttcttctgcaggaac

SEQ ID NO: 4662 - DNA, 21 bp, Artificial Sequence
  Synthetic sequence
tgtcgcttcttctgcaggaac

SEQ ID NO: 4663 - DNA, 21 bp, Artificial Sequence
  Synthetic sequence
tgtcgcttcttctgcaggaac

SEQ ID NO: 4664 - DNA, 21 bp, Artificial Sequence
  Synthetic sequence
tgtcgcttcttctgcaggaac

SEQ ID NO: 4665 - DNA, 21 bp, Artificial Sequence
  Synthetic sequence
tgtcgcttcttctgcaggaac

SEQ ID NO: 4666 - DNA, 21 bp, Artificial Sequence
  Synthetic sequence
tgtcgcttcttctgcaggaac

SEQ ID NO: 4667 - DNA, 21 bp, Artificial Sequence
  Synthetic sequence
tgtcgcttcttctgcaggaac

SEQ ID NO: 4668 - DNA, 21 bp, Artificial Sequence
  Synthetic sequence
tgtcgcttcttctgcaggaac

SEQ ID NO: 4669 - DNA, 21 bp, Artificial Sequence
  Synthetic sequence
tgtcgcttcttctgcaggaac

SEQ ID NO: 4670 - DNA, 21 bp, Artificial Sequence
  Synthetic sequence
tgtcgcttcttctgcaggaac

SEQ ID NO: 4671 - DNA, 21 bp, Artificial Sequence
  Synthetic sequence
tgtcgcttcttctgcaggaac

SEQ ID NO: 4672 - DNA, 21 bp, Artificial Sequence
  Synthetic sequence
tgtcgcttcttctgcaggaac

SEQ ID NO: 4673 - DNA, 21 bp, Artificial Sequence
  Synthetic sequence
tgtcgcttcttctgcaggaac

SEQ ID NO: 4674 - DNA, 21 bp, Artificial Sequence
  Synthetic sequence
tgtcgcttcttctgcaggaac

SEQ ID NO: 4675 - DNA, 22 bp, Artificial Sequence
  Synthetic sequence
tgtcgcttcttctgcaggaaca

SEQ ID NO: 4676 - DNA, 22 bp, Artificial Sequence
  Synthetic sequence
tgtcgcttcttctgcaggaaca

SEQ ID NO: 4677 - DNA, 22 bp, Artificial Sequence
  Synthetic sequence
tgtcgcttcttctgcaggaaca

SEQ ID NO: 4678 - DNA, 22 bp, Artificial Sequence
  Synthetic sequence
tgtcgcttcttctgcaggaaca

SEQ ID NO: 4679 - DNA, 22 bp, Artificial Sequence
  Synthetic sequence
tgtcgcttcttctgcaggaaca

SEQ ID NO: 4680 - DNA, 22 bp, Artificial Sequence
  Synthetic sequence
tgtcgcttcttctgcaggaaca

SEQ ID NO: 4681 - DNA, 22 bp, Artificial Sequence
  Synthetic sequence
tgtcgcttcttctgcaggaaca

SEQ ID NO: 4682 - DNA, 22 bp, Artificial Sequence
  Synthetic sequence
tgtcgcttcttctgcaggaaca

SEQ ID NO: 4683 - DNA, 22 bp, Artificial Sequence
  Synthetic sequence
tgtcgcttcttctgcaggaaca

SEQ ID NO: 4684 - DNA, 22 bp, Artificial Sequence
  Synthetic sequence
tgtcgcttcttctgcaggaaca

SEQ ID NO: 4685 - DNA, 22 bp, Artificial Sequence
  Synthetic sequence
tgtcgcttcttctgcaggaaca

SEQ ID NO: 4686 - DNA, 22 bp, Artificial Sequence
  Synthetic sequence
tgtcgcttcttctgcaggaaca

SEQ ID NO: 4687 - DNA, 22 bp, Artificial Sequence
  Synthetic sequence
tgtcgcttcttctgcaggaaca

SEQ ID NO: 4688 - DNA, 22 bp, Artificial Sequence
  Synthetic sequence
tgtcgcttcttctgcaggaaca

SEQ ID NO: 4689 - DNA, 22 bp, Artificial Sequence
  Synthetic sequence
tgtcgcttcttctgcaggaaca

SEQ ID NO: 4690 - DNA, 22 bp, Artificial Sequence
  Synthetic sequence
tgtcgcttcttctgcaggaaca

SEQ ID NO: 4691 - DNA, 23 bp, Artificial Sequence
  Synthetic sequence
tgtcgcttcttctgcaggaacat

SEQ ID NO: 4692 - DNA, 23 bp, Artificial Sequence
  Synthetic sequence
tgtcgcttcttctgcaggaacat

SEQ ID NO: 4693 - DNA, 23 bp, Artificial Sequence
  Synthetic sequence
tgtcgcttcttctgcaggaacat

SEQ ID NO: 4694 - DNA, 23 bp, Artificial Sequence
  Synthetic sequence
tgtcgcttcttctgcaggaacat

SEQ ID NO: 4695 - DNA, 23 bp, Artificial Sequence
  Synthetic sequence
tgtcgcttcttctgcaggaacat

SEQ ID NO: 4696 - DNA, 23 bp, Artificial Sequence
  Synthetic sequence
tgtcgcttcttctgcaggaacat

SEQ ID NO: 4697 - DNA, 23 bp, Artificial Sequence
  Synthetic sequence
tgtcgcttcttctgcaggaacat

SEQ ID NO: 4698 - DNA, 23 bp, Artificial Sequence
  Synthetic sequence
tgtcgcttcttctgcaggaacat

SEQ ID NO: 4699 - DNA, 23 bp, Artificial Sequence
  Synthetic sequence
tgtcgcttcttctgcaggaacat

SEQ ID NO: 4700 - DNA, 23 bp, Artificial Sequence
  Synthetic sequence
tgtcgcttcttctgcaggaacat

SEQ ID NO: 4701 - DNA, 23 bp, Artificial Sequence
  Synthetic sequence
tgtcgcttcttctgcaggaacat

SEQ ID NO: 4702 - DNA, 23 bp, Artificial Sequence
  Synthetic sequence
tgtcgcttcttctgcaggaacat

SEQ ID NO: 4703 - DNA, 23 bp, Artificial Sequence
  Synthetic sequence
tgtcgcttcttctgcaggaacat

SEQ ID NO: 4704 - DNA, 23 bp, Artificial Sequence
  Synthetic sequence
tgtcgcttcttctgcaggaacat

SEQ ID NO: 4705 - DNA, 23 bp, Artificial Sequence
  Synthetic sequence
tgtcgcttcttctgcaggaacat

SEQ ID NO: 4706 - DNA, 23 bp, Artificial Sequence
  Synthetic sequence
tgtcgcttcttctgcaggaacat

SEQ ID NO: 4707 - DNA, 21 bp, Artificial Sequence
  Synthetic sequence
tgtcgcttcttctgcaggaac

SEQ ID NO: 4708 - DNA, 21 bp, Artificial Sequence
  Synthetic sequence
tgtcgcttcttctgcaggaac

SEQ ID NO: 4709 - DNA, 21 bp, Artificial Sequence
  Synthetic sequence
tgtcgcttcttctgcaggaac

SEQ ID NO: 4710 - DNA, 21 bp, Artificial Sequence
  Synthetic sequence
tgtcgcttcttctgcaggaac

SEQ ID NO: 4711 - DNA, 21 bp, Artificial Sequence
  Synthetic sequence
tgtcgcttcttctgcaggaac

SEQ ID NO: 4712 - DNA, 21 bp, Artificial Sequence
  Synthetic sequence
tgtcgcttcttctgcaggaac

SEQ ID NO: 4713 - DNA, 21 bp, Artificial Sequence
  Synthetic sequence
tgtcgcttcttctgcaggaac

SEQ ID NO: 4714 - DNA, 21 bp, Artificial Sequence
  Synthetic sequence
tgtcgcttcttctgcaggaac

SEQ ID NO: 4715 - DNA, 21 bp, Artificial Sequence
  Synthetic sequence
tgtcgcttcttctgcaggaac

SEQ ID NO: 4716 - DNA, 21 bp, Artificial Sequence
  Synthetic sequence
tgtcgcttcttctgcaggaac

SEQ ID NO: 4717 - DNA, 21 bp, Artificial Sequence
  Synthetic sequence
tgtcgcttcttctgcaggaac

SEQ ID NO: 4718 - DNA, 21 bp, Artificial Sequence
  Synthetic sequence
tgtcgcttcttctgcaggaac

SEQ ID NO: 4719 - DNA, 21 bp, Artificial Sequence
  Synthetic sequence
tgtcgcttcttctgcaggaac

SEQ ID NO: 4720 - DNA, 21 bp, Artificial Sequence
  Synthetic sequence
tgtcgcttcttctgcaggaac

SEQ ID NO: 4721 - DNA, 21 bp, Artificial Sequence
  Synthetic sequence
tgtcgcttcttctgcaggaac

SEQ ID NO: 4722 - DNA, 21 bp, Artificial Sequence
  Synthetic sequence
tgtcgcttcttctgcaggaac

SEQ ID NO: 4723 - DNA, 22 bp, Artificial Sequence
  Synthetic sequence
tgtcgcttcttctgcaggaaca

SEQ ID NO: 4724 - DNA, 22 bp, Artificial Sequence
  Synthetic sequence
tgtcgcttcttctgcaggaaca

SEQ ID NO: 4725 - DNA, 22 bp, Artificial Sequence
  Synthetic sequence
tgtcgcttcttctgcaggaaca

SEQ ID NO: 4726 - DNA, 22 bp, Artificial Sequence
  Synthetic sequence
tgtcgcttcttctgcaggaaca

SEQ ID NO: 4727 - DNA, 22 bp, Artificial Sequence
  Synthetic sequence
tgtcgcttcttctgcaggaaca

SEQ ID NO: 4728 - DNA, 22 bp, Artificial Sequence
  Synthetic sequence
tgtcgcttcttctgcaggaaca

SEQ ID NO: 4729 - DNA, 22 bp, Artificial Sequence
  Synthetic sequence
tgtcgcttcttctgcaggaaca

SEQ ID NO: 4730 - DNA, 22 bp, Artificial Sequence
  Synthetic sequence
tgtcgcttcttctgcaggaaca

SEQ ID NO: 4731 - DNA, 22 bp, Artificial Sequence
  Synthetic sequence
tgtcgcttcttctgcaggaaca

SEQ ID NO: 4732 - DNA, 22 bp, Artificial Sequence
  Synthetic sequence
tgtcgcttcttctgcaggaaca

SEQ ID NO: 4733 - DNA, 22 bp, Artificial Sequence
  Synthetic sequence
tgtcgcttcttctgcaggaaca

SEQ ID NO: 4734 - DNA, 22 bp, Artificial Sequence
  Synthetic sequence
tgtcgcttcttctgcaggaaca

SEQ ID NO: 4735 - DNA, 22 bp, Artificial Sequence
  Synthetic sequence
tgtcgcttcttctgcaggaaca

SEQ ID NO: 4736 - DNA, 22 bp, Artificial Sequence
  Synthetic sequence
tgtcgcttcttctgcaggaaca

SEQ ID NO: 4737 - DNA, 22 bp, Artificial Sequence
  Synthetic sequence
tgtcgcttcttctgcaggaaca

SEQ ID NO: 4738 - DNA, 22 bp, Artificial Sequence
  Synthetic sequence
tgtcgcttcttctgcaggaaca

SEQ ID NO: 4739 - DNA, 20 bp, Artificial Sequence
  Synthetic sequence
ttgtcgcttcttctgcagga

SEQ ID NO: 4740 - DNA, 20 bp, Artificial Sequence
  Synthetic sequence
ttgtcgcttcttctgcagga

SEQ ID NO: 4741 - DNA, 20 bp, Artificial Sequence
  Synthetic sequence
ttgtcgcttcttctgcagga

SEQ ID NO: 4742 - DNA, 20 bp, Artificial Sequence
  Synthetic sequence
ttgtcgcttcttctgcagga

SEQ ID NO: 4743 - DNA, 20 bp, Artificial Sequence
  Synthetic sequence
ttgtcgcttcttctgcagga

SEQ ID NO: 4744 - DNA, 20 bp, Artificial Sequence
  Synthetic sequence
ttgtcgcttcttctgcagga

SEQ ID NO: 4745 - DNA, 20 bp, Artificial Sequence
  Synthetic sequence
ttgtcgcttcttctgcagga

SEQ ID NO: 4746 - DNA, 20 bp, Artificial Sequence
  Synthetic sequence
ttgtcgcttcttctgcagga

SEQ ID NO: 4747 - DNA, 20 bp, Artificial Sequence
  Synthetic sequence
ttgtcgcttcttctgcagga

SEQ ID NO: 4748 - DNA, 20 bp, Artificial Sequence
  Synthetic sequence
ttgtcgcttcttctgcagga

SEQ ID NO: 4749 - DNA, 20 bp, Artificial Sequence
  Synthetic sequence
ttgtcgcttcttctgcagga

SEQ ID NO: 4750 - DNA, 20 bp, Artificial Sequence
  Synthetic sequence
ttgtcgcttcttctgcagga

SEQ ID NO: 4751 - DNA, 20 bp, Artificial Sequence
  Synthetic sequence
ttgtcgcttcttctgcagga

SEQ ID NO: 4752 - DNA, 20 bp, Artificial Sequence
  Synthetic sequence
ttgtcgcttcttctgcagga

SEQ ID NO: 4753 - DNA, 20 bp, Artificial Sequence
  Synthetic sequence
ttgtcgcttcttctgcagga

SEQ ID NO: 4754 - DNA, 20 bp, Artificial Sequence
  Synthetic sequence
ttgtcgcttcttctgcagga

SEQ ID NO: 4755 - DNA, 20 bp, Artificial Sequence
  Synthetic sequence
ttgtcgcttcttctgcagga

SEQ ID NO: 4756 - DNA, 20 bp, Artificial Sequence
  Synthetic sequence
ttgtcgcttcttctgcagga

SEQ ID NO: 4757 - DNA, 20 bp, Artificial Sequence
  Synthetic sequence
ttgtcgcttcttctgcagga

SEQ ID NO: 4758 - DNA, 20 bp, Artificial Sequence
  Synthetic sequence
ttgtcgcttcttctgcagga

SEQ ID NO: 4759 - DNA, 20 bp, Artificial Sequence
  Synthetic sequence
ttgtcgcttcttctgcagga

SEQ ID NO: 4760 - DNA, 20 bp, Artificial Sequence
  Synthetic sequence
ttgtcgcttcttctgcagga

SEQ ID NO: 4761 - DNA, 19 bp, Artificial Sequence
  Synthetic sequence
ttgtcgcttcttctgcagg

SEQ ID NO: 4762 - DNA, 19 bp, Artificial Sequence
  Synthetic sequence
ttgtcgcttcttctgcagg

SEQ ID NO: 4763 - DNA, 19 bp, Artificial Sequence
  Synthetic sequence
ttgtcgcttcttctgcagg

SEQ ID NO: 4764 - DNA, 19 bp, Artificial Sequence
  Synthetic sequence
ttgtcgcttcttctgcagg

SEQ ID NO: 4765 - DNA, 19 bp, Artificial Sequence
  Synthetic sequence
ttgtcgcttcttctgcagg

SEQ ID NO: 4766 - DNA, 19 bp, Artificial Sequence
  Synthetic sequence
tgtcgcttcttctgcagga

SEQ ID NO: 4767 - DNA, 19 bp, Artificial Sequence
  Synthetic sequence
tgtcgcttcttctgcagga

SEQ ID NO: 4768 - DNA, 19 bp, Artificial Sequence
  Synthetic sequence
tgtcgcttcttctgcagga

SEQ ID NO: 4769 - DNA, 19 bp, Artificial Sequence
  Synthetic sequence
tgtcgcttcttctgcagga

SEQ ID NO: 4770 - DNA, 19 bp, Artificial Sequence
  Synthetic sequence
tgtcgcttcttctgcagga

SEQ ID NO: 4771 - DNA, 20 bp, Artificial Sequence
  Synthetic sequence
ttgtcgcttcttctgcagga

SEQ ID NO: 4772 - DNA, 20 bp, Artificial Sequence
  Synthetic sequence
ttgtcgcttcttctgcagga

SEQ ID NO: 4773 - DNA, 20 bp, Artificial Sequence
  Synthetic sequence
ttgtcgcttcttctgcagga

SEQ ID NO: 4774 - DNA, 20 bp, Artificial Sequence
  Synthetic sequence
ttgtcgcttcttctgcagga

SEQ ID NO: 4775 - DNA, 20 bp, Artificial Sequence
  Synthetic sequence
ttgtcgcttcttctgcagga

SEQ ID NO: 4776 - DNA, 20 bp, Artificial Sequence
  Synthetic sequence
ttgtcgcttcttctgcagga

SEQ ID NO: 4777 - DNA, 20 bp, Artificial Sequence
  Synthetic sequence
ttgtcgcttcttctgcagga

SEQ ID NO: 4778 - DNA, 20 bp, Artificial Sequence
  Synthetic sequence
ttgtcgcttcttctgcagga

SEQ ID NO: 4779 - DNA, 19 bp, Artificial Sequence
  Synthetic sequence
ttgtcgcttcttctgcagg

SEQ ID NO: 4780 - DNA, 19 bp, Artificial Sequence
  Synthetic sequence
ttgtcgcttcttctgcagg

SEQ ID NO: 4781 - DNA, 19 bp, Artificial Sequence
  Synthetic sequence
ttgtcgcttcttctgcagg

SEQ ID NO: 4782 - DNA, 19 bp, Artificial Sequence
  Synthetic sequence
ttgtcgcttcttctgcagg

SEQ ID NO: 4783 - DNA, 20 bp, Artificial Sequence
  Synthetic sequence
ttgtcgcttcttctgcagga

SEQ ID NO: 4784 - DNA, 20 bp, Artificial Sequence
  Synthetic sequence
ttgtcgcttcttctgcagga

SEQ ID NO: 4785 - DNA, 20 bp, Artificial Sequence
  Synthetic sequence
ttgtcgcttcttctgcagga

SEQ ID NO: 4786 - DNA, 18 bp, Artificial Sequence
  Synthetic sequence
ttgtcgcttcttctgcag

SEQ ID NO: 4787 - DNA, 18 bp, Artificial Sequence
  Synthetic sequence
ttgtcgcttcttctgcag

SEQ ID NO: 4788 - DNA, 18 bp, Artificial Sequence
  Synthetic sequence
ttgtcgcttcttctgcag

SEQ ID NO: 4789 - DNA, 18 bp, Artificial Sequence
  Synthetic sequence
ttgtcgcttcttctgcag

SEQ ID NO: 4790 - DNA, 18 bp, Artificial Sequence
  Synthetic sequence
gtcgcttcttctgcagga

SEQ ID NO: 4791 - DNA, 18 bp, Artificial Sequence
  Synthetic sequence
gtcgcttcttctgcagga

SEQ ID NO: 4792 - DNA, 18 bp, Artificial Sequence
  Synthetic sequence
gtcgcttcttctgcagga

SEQ ID NO: 4793 - DNA, 18 bp, Artificial Sequence
  Synthetic sequence
gtcgcttcttctgcagga

SEQ ID NO: 4794 - DNA, 20 bp, Artificial Sequence
  Synthetic sequence
ttgtcgcttcttctgcagga

SEQ ID NO: 4795 - DNA, 20 bp, Artificial Sequence
  Synthetic sequence
ttgtcgcttcttctgcagga

SEQ ID NO: 4796 - DNA, 20 bp, Artificial Sequence
  Synthetic sequence
ttgtcgcttcttctgcagga

SEQ ID NO: 4797 - DNA, 20 bp, Artificial Sequence
  Synthetic sequence
ttgtcgcttcttctgcagga

SEQ ID NO: 4798 - DNA, 20 bp, Artificial Sequence
  Synthetic sequence
ttgtcgcttcttctgcagga

SEQ ID NO: 4799 - DNA, 20 bp, Artificial Sequence
  Synthetic sequence
ttgtcgcttcttctgcagga

SEQ ID NO: 4800 - DNA, 19 bp, Artificial Sequence
  Synthetic sequence
ttgtcgcttcttctgcagg

SEQ ID NO: 4801 - DNA, 19 bp, Artificial Sequence
  Synthetic sequence
ttgtcgcttcttctgcagg

SEQ ID NO: 4802 - DNA, 19 bp, Artificial Sequence
  Synthetic sequence
ttgtcgcttcttctgcagg

SEQ ID NO: 4803 - DNA, 19 bp, Artificial Sequence
  Synthetic sequence
tgtcgcttcttctgcagga

SEQ ID NO: 4804 - DNA, 19 bp, Artificial Sequence
  Synthetic sequence
tgtcgcttcttctgcagga

SEQ ID NO: 4805 - DNA, 19 bp, Artificial Sequence
  Synthetic sequence
tgtcgcttcttctgcagga

SEQ ID NO: 4806 - DNA, 18 bp, Artificial Sequence
  Synthetic sequence
ttgtcgcttcttctgcag

SEQ ID NO: 4807 - DNA, 18 bp, Artificial Sequence
  Synthetic sequence
ttgtcgcttcttctgcag

SEQ ID NO: 4808 - DNA, 18 bp, Artificial Sequence
  Synthetic sequence
ttgtcgcttcttctgcag

SEQ ID NO: 4809 - DNA, 18 bp, Artificial Sequence
  Synthetic sequence
gtcgcttcttctgcagga

SEQ ID NO: 4810 - DNA, 18 bp, Artificial Sequence
  Synthetic sequence
gtcgcttcttctgcagga

SEQ ID NO: 4811 - DNA, 18 bp, Artificial Sequence
  Synthetic sequence
gtcgcttcttctgcagga

SEQ ID NO: 4812 - DNA, 17 bp, Artificial Sequence
  Synthetic sequence
ttgtcgcttcttctgca

SEQ ID NO: 4813 - DNA, 17 bp, Artificial Sequence
  Synthetic sequence
ttgtcgcttcttctgca

SEQ ID NO: 4814 - DNA, 17 bp, Artificial Sequence
  Synthetic sequence
ttgtcgcttcttctgca

SEQ ID NO: 4815 - DNA, 17 bp, Artificial Sequence
  Synthetic sequence
tcgcttcttctgcagga

SEQ ID NO: 4816 - DNA, 17 bp, Artificial Sequence
  Synthetic sequence
tcgcttcttctgcagga

SEQ ID NO: 4817 - DNA, 17 bp, Artificial Sequence
  Synthetic sequence
tcgcttcttctgcagga

SEQ ID NO: 4818 - DNA, 19 bp, Artificial Sequence
  Synthetic sequence
tgtcgcttcttctgcagga

SEQ ID NO: 4819 - DNA, 19 bp, Artificial Sequence
  Synthetic sequence
tgtcgcttcttctgcagga

SEQ ID NO: 4820 - DNA, 19 bp, Artificial Sequence
  Synthetic sequence
ttgtcgcttcttctgcagg

SEQ ID NO: 4821 - DNA, 19 bp, Artificial Sequence
  Synthetic sequence
ttgtcgcttcttctgcagg

SEQ ID NO: 4822 - DNA, 18 bp, Artificial Sequence
  Synthetic sequence
tgtcgcttcttctgcagg

SEQ ID NO: 4823 - DNA, 18 bp, Artificial Sequence
  Synthetic sequence
tgtcgcttcttctgcagg

SEQ ID NO: 4824 - DNA, 18 bp, Artificial Sequence
  Synthetic sequence
tgtcgcttcttctgcagg

SEQ ID NO: 4825 - DNA, 18 bp, Artificial Sequence
  Synthetic sequence
tgtcgcttcttctgcagg

SEQ ID NO: 4826 - DNA, 17 bp, Artificial Sequence
  Synthetic sequence
tgtcgcttcttctgcag

SEQ ID NO: 4827 - DNA, 17 bp, Artificial Sequence
  Synthetic sequence
tgtcgcttcttctgcag

SEQ ID NO: 4828 - DNA, 17 bp, Artificial Sequence
  Synthetic sequence
tgtcgcttcttctgcag

SEQ ID NO: 4829 - DNA, 20 bp, Artificial Sequence
  Synthetic sequence
ttgtcgcttcttctgcagga

SEQ ID NO: 4830 - DNA, 20 bp, Artificial Sequence
  Synthetic sequence
ttgtcgcttcttctgcagga

SEQ ID NO: 4831 - DNA, 20 bp, Artificial Sequence
  Synthetic sequence
ttgtcgcttcttctgcagga

SEQ ID NO: 4832 - DNA, 20 bp, Artificial Sequence
  Synthetic sequence
ttgtcgcttcttctgcagga

SEQ ID NO: 4833 - DNA, 19 bp, Artificial Sequence
  Synthetic sequence
ttgtcgcttcttctgcagg

SEQ ID NO: 4834 - DNA, 19 bp, Artificial Sequence
  Synthetic sequence
tgtcgcttcttctgcagga

SEQ ID NO: 4835 - DNA, 20 bp, Artificial Sequence
  Synthetic sequence
ttgtcgcttcttctgcagga

SEQ ID NO: 4836 - DNA, 20 bp, Artificial Sequence
  Synthetic sequence
ttgtcgcttcttctgcagga

SEQ ID NO: 4837 - DNA, 19 bp, Artificial Sequence
  Synthetic sequence
ttgtcgcttcttctgcagg

SEQ ID NO: 4838 - DNA, 20 bp, Artificial Sequence
  Synthetic sequence
ttgtcgcttcttctgcagga

SEQ ID NO: 4839 - DNA, 18 bp, Artificial Sequence
  Synthetic sequence
ttgtcgcttcttctgcag

SEQ ID NO: 4840 - DNA, 18 bp, Artificial Sequence
  Synthetic sequence
gtcgcttcttctgcagga

SEQ ID NO: 4841 - DNA, 20 bp, Artificial Sequence
  Synthetic sequence
ttgtcgcttcttctgcagga

SEQ ID NO: 4842 - DNA, 19 bp, Artificial Sequence
  Synthetic sequence
ttgtcgcttcttctgcagg

SEQ ID NO: 4843 - DNA, 18 bp, Artificial Sequence
  Synthetic sequence
ttgtcgcttcttctgcag

SEQ ID NO: 4844 - DNA, 18 bp, Artificial Sequence
  Synthetic sequence
gtcgcttcttctgcagga

SEQ ID NO: 4845 - DNA, 17 bp, Artificial Sequence
  Synthetic sequence
ttgtcgcttcttctgca

SEQ ID NO: 4846 - DNA, 17 bp, Artificial Sequence
  Synthetic sequence
tcgcttcttctgcagga

SEQ ID NO: 4847 - DNA, 19 bp, Artificial Sequence
  Synthetic sequence
tgtcgcttcttctgcagga

SEQ ID NO: 4848 - DNA, 18 bp, Artificial Sequence
  Synthetic sequence
tgtcgcttcttctgcagg

SEQ ID NO: 4849 - DNA, 17 bp, Artificial Sequence
  Synthetic sequence
tgtcgcttcttctgcag

SEQ ID NO: 4850 - DNA, 20 bp, Artificial Sequence
  Synthetic sequence
ttgtcgcttcttctgcagga

SEQ ID NO: 4851 - DNA, 20 bp, Artificial Sequence
  Synthetic sequence
ttgtcgcttcttctgcagga

SEQ ID NO: 4852 - DNA, 20 bp, Artificial Sequence
  Synthetic sequence
ttgtcgcttcttctgcagga

SEQ ID NO: 4853 - DNA, 20 bp, Artificial Sequence
  Synthetic sequence
ttgtcgcttcttctgcagga

SEQ ID NO: 4854 - DNA, 20 bp, Artificial Sequence
  Synthetic sequence
ttgtcgcttcttctgcagga

SEQ ID NO: 4855 - DNA, 20 bp, Artificial Sequence
  Synthetic sequence
ttgtcgcttcttctgcagga

SEQ ID NO: 4856 - DNA, 20 bp, Artificial Sequence
  Synthetic sequence
ttgtcgcttcttctgcagga

SEQ ID NO: 4857 - DNA, 20 bp, Artificial Sequence
  Synthetic sequence
ttgtcgcttcttctgcagga

SEQ ID NO: 4858 - DNA, 20 bp, Artificial Sequence
  Synthetic sequence
ttgtcgcttcttctgcagga

SEQ ID NO: 4859 - DNA, 20 bp, Artificial Sequence
  Synthetic sequence
ttgtcgcttcttctgcagga

SEQ ID NO: 4860 - DNA, 20 bp, Artificial Sequence
  Synthetic sequence
ttgtcgcttcttctgcagga

SEQ ID NO: 4861 - DNA, 20 bp, Artificial Sequence
  Synthetic sequence
ttgtcgcttcttctgcagga

SEQ ID NO: 4862 - DNA, 20 bp, Artificial Sequence
  Synthetic sequence
ttgtcgcttcttctgcagga

SEQ ID NO: 4863 - DNA, 20 bp, Artificial Sequence
  Synthetic sequence
ttgtcgcttcttctgcagga

SEQ ID NO: 4864 - DNA, 20 bp, Artificial Sequence
  Synthetic sequence
ttgtcgcttcttctgcagga

SEQ ID NO: 4865 - DNA, 21 bp, Artificial Sequence
  Synthetic sequence
ttgtcgcttcttctgcaggaa

SEQ ID NO: 4866 - DNA, 21 bp, Artificial Sequence
  Synthetic sequence
ttgtcgcttcttctgcaggaa

SEQ ID NO: 4867 - DNA, 21 bp, Artificial Sequence
  Synthetic sequence
ttgtcgcttcttctgcaggaa

SEQ ID NO: 4868 - DNA, 21 bp, Artificial Sequence
  Synthetic sequence
ttgtcgcttcttctgcaggaa

SEQ ID NO: 4869 - DNA, 21 bp, Artificial Sequence
  Synthetic sequence
ttgtcgcttcttctgcaggaa

SEQ ID NO: 4870 - DNA, 21 bp, Artificial Sequence
  Synthetic sequence
ttgtcgcttcttctgcaggaa

SEQ ID NO: 4871 - DNA, 21 bp, Artificial Sequence
  Synthetic sequence
ttgtcgcttcttctgcaggaa

SEQ ID NO: 4872 - DNA, 21 bp, Artificial Sequence
  Synthetic sequence
ttgtcgcttcttctgcaggaa

SEQ ID NO: 4873 - DNA, 21 bp, Artificial Sequence
  Synthetic sequence
ttgtcgcttcttctgcaggaa

SEQ ID NO: 4874 - DNA, 21 bp, Artificial Sequence
  Synthetic sequence
ttgtcgcttcttctgcaggaa

SEQ ID NO: 4875 - DNA, 21 bp, Artificial Sequence
  Synthetic sequence
ttgtcgcttcttctgcaggaa

SEQ ID NO: 4876 - DNA, 21 bp, Artificial Sequence
  Synthetic sequence
ttgtcgcttcttctgcaggaa

SEQ ID NO: 4877 - DNA, 21 bp, Artificial Sequence
  Synthetic sequence
ttgtcgcttcttctgcaggaa

SEQ ID NO: 4878 - DNA, 21 bp, Artificial Sequence
  Synthetic sequence
ttgtcgcttcttctgcaggaa

SEQ ID NO: 4879 - DNA, 21 bp, Artificial Sequence
  Synthetic sequence
ttgtcgcttcttctgcaggaa

SEQ ID NO: 4880 - DNA, 21 bp, Artificial Sequence
  Synthetic sequence
ttgtcgcttcttctgcaggaa

SEQ ID NO: 4881 - DNA, 22 bp, Artificial Sequence
  Synthetic sequence
ttgtcgcttcttctgcaggaac

SEQ ID NO: 4882 - DNA, 22 bp, Artificial Sequence
  Synthetic sequence
ttgtcgcttcttctgcaggaac

SEQ ID NO: 4883 - DNA, 22 bp, Artificial Sequence
  Synthetic sequence
ttgtcgcttcttctgcaggaac

SEQ ID NO: 4884 - DNA, 22 bp, Artificial Sequence
  Synthetic sequence
ttgtcgcttcttctgcaggaac

SEQ ID NO: 4885 - DNA, 22 bp, Artificial Sequence
  Synthetic sequence
ttgtcgcttcttctgcaggaac

SEQ ID NO: 4886 - DNA, 22 bp, Artificial Sequence
  Synthetic sequence
ttgtcgcttcttctgcaggaac

SEQ ID NO: 4887 - DNA, 22 bp, Artificial Sequence
  Synthetic sequence
ttgtcgcttcttctgcaggaac

SEQ ID NO: 4888 - DNA, 22 bp, Artificial Sequence
  Synthetic sequence
ttgtcgcttcttctgcaggaac

SEQ ID NO: 4889 - DNA, 22 bp, Artificial Sequence
  Synthetic sequence
ttgtcgcttcttctgcaggaac

SEQ ID NO: 4890 - DNA, 22 bp, Artificial Sequence
  Synthetic sequence
ttgtcgcttcttctgcaggaac

SEQ ID NO: 4891 - DNA, 22 bp, Artificial Sequence
  Synthetic sequence
ttgtcgcttcttctgcaggaac

SEQ ID NO: 4892 - DNA, 22 bp, Artificial Sequence
  Synthetic sequence
ttgtcgcttcttctgcaggaac

SEQ ID NO: 4893 - DNA, 22 bp, Artificial Sequence
  Synthetic sequence
ttgtcgcttcttctgcaggaac

SEQ ID NO: 4894 - DNA, 22 bp, Artificial Sequence
  Synthetic sequence
ttgtcgcttcttctgcaggaac

SEQ ID NO: 4895 - DNA, 22 bp, Artificial Sequence
  Synthetic sequence
ttgtcgcttcttctgcaggaac

SEQ ID NO: 4896 - DNA, 22 bp, Artificial Sequence
  Synthetic sequence
ttgtcgcttcttctgcaggaac

SEQ ID NO: 4897 - DNA, 23 bp, Artificial Sequence
  Synthetic sequence
ttgtcgcttcttctgcaggaaca

SEQ ID NO: 4898 - DNA, 23 bp, Artificial Sequence
  Synthetic sequence
ttgtcgcttcttctgcaggaaca

SEQ ID NO: 4899 - DNA, 23 bp, Artificial Sequence
  Synthetic sequence
ttgtcgcttcttctgcaggaaca

SEQ ID NO: 4900 - DNA, 23 bp, Artificial Sequence
  Synthetic sequence
ttgtcgcttcttctgcaggaaca

SEQ ID NO: 4901 - DNA, 23 bp, Artificial Sequence
  Synthetic sequence
ttgtcgcttcttctgcaggaaca

SEQ ID NO: 4902 - DNA, 23 bp, Artificial Sequence
  Synthetic sequence
ttgtcgcttcttctgcaggaaca

SEQ ID NO: 4903 - DNA, 23 bp, Artificial Sequence
  Synthetic sequence
ttgtcgcttcttctgcaggaaca

SEQ ID NO: 4904 - DNA, 23 bp, Artificial Sequence
  Synthetic sequence
ttgtcgcttcttctgcaggaaca

SEQ ID NO: 4905 - DNA, 23 bp, Artificial Sequence
  Synthetic sequence
ttgtcgcttcttctgcaggaaca

SEQ ID NO: 4906 - DNA, 23 bp, Artificial Sequence
  Synthetic sequence
ttgtcgcttcttctgcaggaaca

SEQ ID NO: 4907 - DNA, 23 bp, Artificial Sequence
  Synthetic sequence
ttgtcgcttcttctgcaggaaca

SEQ ID NO: 4908 - DNA, 23 bp, Artificial Sequence
  Synthetic sequence
ttgtcgcttcttctgcaggaaca

SEQ ID NO: 4909 - DNA, 23 bp, Artificial Sequence
  Synthetic sequence
ttgtcgcttcttctgcaggaaca

SEQ ID NO: 4910 - DNA, 23 bp, Artificial Sequence
  Synthetic sequence
ttgtcgcttcttctgcaggaaca

SEQ ID NO: 4911 - DNA, 23 bp, Artificial Sequence
  Synthetic sequence
ttgtcgcttcttctgcaggaaca

SEQ ID NO: 4912 - DNA, 23 bp, Artificial Sequence
  Synthetic sequence
ttgtcgcttcttctgcaggaaca

SEQ ID NO: 4913 - DNA, 21 bp, Artificial Sequence
  Synthetic sequence
ttgtcgcttcttctgcaggaa

SEQ ID NO: 4914 - DNA, 21 bp, Artificial Sequence
  Synthetic sequence
ttgtcgcttcttctgcaggaa

SEQ ID NO: 4915 - DNA, 21 bp, Artificial Sequence
  Synthetic sequence
ttgtcgcttcttctgcaggaa

SEQ ID NO: 4916 - DNA, 21 bp, Artificial Sequence
  Synthetic sequence
ttgtcgcttcttctgcaggaa

SEQ ID NO: 4917 - DNA, 21 bp, Artificial Sequence
  Synthetic sequence
ttgtcgcttcttctgcaggaa

SEQ ID NO: 4918 - DNA, 21 bp, Artificial Sequence
  Synthetic sequence
ttgtcgcttcttctgcaggaa

SEQ ID NO: 4919 - DNA, 21 bp, Artificial Sequence
  Synthetic sequence
ttgtcgcttcttctgcaggaa

SEQ ID NO: 4920 - DNA, 21 bp, Artificial Sequence
  Synthetic sequence
ttgtcgcttcttctgcaggaa

SEQ ID NO: 4921 - DNA, 21 bp, Artificial Sequence
  Synthetic sequence
ttgtcgcttcttctgcaggaa

SEQ ID NO: 4922 - DNA, 21 bp, Artificial Sequence
  Synthetic sequence
ttgtcgcttcttctgcaggaa

SEQ ID NO: 4923 - DNA, 21 bp, Artificial Sequence
  Synthetic sequence
ttgtcgcttcttctgcaggaa

SEQ ID NO: 4924 - DNA, 21 bp, Artificial Sequence
  Synthetic sequence
ttgtcgcttcttctgcaggaa

SEQ ID NO: 4925 - DNA, 21 bp, Artificial Sequence
  Synthetic sequence
ttgtcgcttcttctgcaggaa

SEQ ID NO: 4926 - DNA, 21 bp, Artificial Sequence
  Synthetic sequence
ttgtcgcttcttctgcaggaa

SEQ ID NO: 4927 - DNA, 21 bp, Artificial Sequence
  Synthetic sequence
ttgtcgcttcttctgcaggaa

SEQ ID NO: 4928 - DNA, 21 bp, Artificial Sequence
  Synthetic sequence
ttgtcgcttcttctgcaggaa

SEQ ID NO: 4929 - DNA, 22 bp, Artificial Sequence
  Synthetic sequence
ttgtcgcttcttctgcaggaac

SEQ ID NO: 4930 - DNA, 22 bp, Artificial Sequence
  Synthetic sequence
ttgtcgcttcttctgcaggaac

SEQ ID NO: 4931 - DNA, 22 bp, Artificial Sequence
  Synthetic sequence
ttgtcgcttcttctgcaggaac

SEQ ID NO: 4932 - DNA, 22 bp, Artificial Sequence
  Synthetic sequence
ttgtcgcttcttctgcaggaac

SEQ ID NO: 4933 - DNA, 22 bp, Artificial Sequence
  Synthetic sequence
ttgtcgcttcttctgcaggaac

SEQ ID NO: 4934 - DNA, 22 bp, Artificial Sequence
  Synthetic sequence
ttgtcgcttcttctgcaggaac

SEQ ID NO: 4935 - DNA, 22 bp, Artificial Sequence
  Synthetic sequence
ttgtcgcttcttctgcaggaac

SEQ ID NO: 4936 - DNA, 22 bp, Artificial Sequence
  Synthetic sequence
ttgtcgcttcttctgcaggaac

SEQ ID NO: 4937 - DNA, 22 bp, Artificial Sequence
  Synthetic sequence
ttgtcgcttcttctgcaggaac

SEQ ID NO: 4938 - DNA, 22 bp, Artificial Sequence
  Synthetic sequence
ttgtcgcttcttctgcaggaac

SEQ ID NO: 4939 - DNA, 22 bp, Artificial Sequence
  Synthetic sequence
ttgtcgcttcttctgcaggaac

SEQ ID NO: 4940 - DNA, 22 bp, Artificial Sequence
  Synthetic sequence
ttgtcgcttcttctgcaggaac

SEQ ID NO: 4941 - DNA, 22 bp, Artificial Sequence
  Synthetic sequence
ttgtcgcttcttctgcaggaac

SEQ ID NO: 4942 - DNA, 22 bp, Artificial Sequence
  Synthetic sequence
ttgtcgcttcttctgcaggaac

SEQ ID NO: 4943 - DNA, 22 bp, Artificial Sequence
  Synthetic sequence
ttgtcgcttcttctgcaggaac

SEQ ID NO: 4944 - DNA, 22 bp, Artificial Sequence
  Synthetic sequence
ttgtcgcttcttctgcaggaac

SEQ ID NO: 4945 - DNA, 20 bp, Artificial Sequence
  Synthetic sequence
tctgattatttctgctgtgt

SEQ ID NO: 4946 - DNA, 20 bp, Artificial Sequence
  Synthetic sequence
tctgattatttctgctgtgt

SEQ ID NO: 4947 - DNA, 20 bp, Artificial Sequence
  Synthetic sequence
tctgattatttctgctgtgt

SEQ ID NO: 4948 - DNA, 20 bp, Artificial Sequence
  Synthetic sequence
tctgattatttctgctgtgt

SEQ ID NO: 4949 - DNA, 20 bp, Artificial Sequence
  Synthetic sequence
tctgattatttctgctgtgt

SEQ ID NO: 4950 - DNA, 20 bp, Artificial Sequence
  Synthetic sequence
tctgattatttctgctgtgt

SEQ ID NO: 4951 - DNA, 20 bp, Artificial Sequence
  Synthetic sequence
tctgattatttctgctgtgt

SEQ ID NO: 4952 - DNA, 20 bp, Artificial Sequence
  Synthetic sequence
tctgattatttctgctgtgt

SEQ ID NO: 4953 - DNA, 20 bp, Artificial Sequence
  Synthetic sequence
tctgattatttctgctgtgt

SEQ ID NO: 4954 - DNA, 20 bp, Artificial Sequence
  Synthetic sequence
tctgattatttctgctgtgt

SEQ ID NO: 4955 - DNA, 20 bp, Artificial Sequence
  Synthetic sequence
tctgattatttctgctgtgt

SEQ ID NO: 4956 - DNA, 20 bp, Artificial Sequence
  Synthetic sequence
tctgattatttctgctgtgt

SEQ ID NO: 4957 - DNA, 20 bp, Artificial Sequence
  Synthetic sequence
tctgattatttctgctgtgt

SEQ ID NO: 4958 - DNA, 20 bp, Artificial Sequence
  Synthetic sequence
tctgattatttctgctgtgt

SEQ ID NO: 4959 - DNA, 20 bp, Artificial Sequence
  Synthetic sequence
tctgattatttctgctgtgt

SEQ ID NO: 4960 - DNA, 20 bp, Artificial Sequence
  Synthetic sequence
tctgattatttctgctgtgt

SEQ ID NO: 4961 - DNA, 20 bp, Artificial Sequence
  Synthetic sequence
tctgattatttctgctgtgt

SEQ ID NO: 4962 - DNA, 20 bp, Artificial Sequence
  Synthetic sequence
tctgattatttctgctgtgt

SEQ ID NO: 4963 - DNA, 20 bp, Artificial Sequence
  Synthetic sequence
tctgattatttctgctgtgt

SEQ ID NO: 4964 - DNA, 20 bp, Artificial Sequence
  Synthetic sequence
tctgattatttctgctgtgt

SEQ ID NO: 4965 - DNA, 20 bp, Artificial Sequence
  Synthetic sequence
tctgattatttctgctgtgt

SEQ ID NO: 4966 - DNA, 20 bp, Artificial Sequence
  Synthetic sequence
tctgattatttctgctgtgt

SEQ ID NO: 4967 - DNA, 19 bp, Artificial Sequence
  Synthetic sequence
tctgattatttctgctgtg

SEQ ID NO: 4968 - DNA, 19 bp, Artificial Sequence
  Synthetic sequence
tctgattatttctgctgtg

SEQ ID NO: 4969 - DNA, 19 bp, Artificial Sequence
  Synthetic sequence
tctgattatttctgctgtg

SEQ ID NO: 4970 - DNA, 19 bp, Artificial Sequence
  Synthetic sequence
tctgattatttctgctgtg

SEQ ID NO: 4971 - DNA, 19 bp, Artificial Sequence
  Synthetic sequence
tctgattatttctgctgtg

SEQ ID NO: 4972 - DNA, 19 bp, Artificial Sequence
  Synthetic sequence
ctgattatttctgctgtgt

SEQ ID NO: 4973 - DNA, 19 bp, Artificial Sequence
  Synthetic sequence
ctgattatttctgctgtgt

SEQ ID NO: 4974 - DNA, 19 bp, Artificial Sequence
  Synthetic sequence
ctgattatttctgctgtgt

SEQ ID NO: 4975 - DNA, 19 bp, Artificial Sequence
  Synthetic sequence
ctgattatttctgctgtgt

SEQ ID NO: 4976 - DNA, 19 bp, Artificial Sequence
  Synthetic sequence
ctgattatttctgctgtgt

SEQ ID NO: 4977 - DNA, 20 bp, Artificial Sequence
  Synthetic sequence
tctgattatttctgctgtgt

SEQ ID NO: 4978 - DNA, 20 bp, Artificial Sequence
  Synthetic sequence
tctgattatttctgctgtgt

SEQ ID NO: 4979 - DNA, 20 bp, Artificial Sequence
  Synthetic sequence
tctgattatttctgctgtgt

SEQ ID NO: 4980 - DNA, 20 bp, Artificial Sequence
  Synthetic sequence
tctgattatttctgctgtgt

SEQ ID NO: 4981 - DNA, 20 bp, Artificial Sequence
  Synthetic sequence
tctgattatttctgctgtgt

SEQ ID NO: 4982 - DNA, 20 bp, Artificial Sequence
  Synthetic sequence
tctgattatttctgctgtgt

SEQ ID NO: 4983 - DNA, 20 bp, Artificial Sequence
  Synthetic sequence
tctgattatttctgctgtgt

SEQ ID NO: 4984 - DNA, 20 bp, Artificial Sequence
  Synthetic sequence
tctgattatttctgctgtgt

SEQ ID NO: 4985 - DNA, 19 bp, Artificial Sequence
  Synthetic sequence
tctgattatttctgctgtg

SEQ ID NO: 4986 - DNA, 19 bp, Artificial Sequence
  Synthetic sequence
tctgattatttctgctgtg

SEQ ID NO: 4987 - DNA, 19 bp, Artificial Sequence
  Synthetic sequence
tctgattatttctgctgtg

SEQ ID NO: 4988 - DNA, 19 bp, Artificial Sequence
  Synthetic sequence
tctgattatttctgctgtg

SEQ ID NO: 4989 - DNA, 20 bp, Artificial Sequence
  Synthetic sequence
tctgattatttctgctgtgt

SEQ ID NO: 4990 - DNA, 20 bp, Artificial Sequence
  Synthetic sequence
tctgattatttctgctgtgt

SEQ ID NO: 4991 - DNA, 20 bp, Artificial Sequence
  Synthetic sequence
tctgattatttctgctgtgt

SEQ ID NO: 4992 - DNA, 18 bp, Artificial Sequence
  Synthetic sequence
tctgattatttctgctgt

SEQ ID NO: 4993 - DNA, 18 bp, Artificial Sequence
  Synthetic sequence
tctgattatttctgctgt

SEQ ID NO: 4994 - DNA, 18 bp, Artificial Sequence
  Synthetic sequence
tctgattatttctgctgt

SEQ ID NO: 4995 - DNA, 18 bp, Artificial Sequence
  Synthetic sequence
tctgattatttctgctgt

SEQ ID NO: 4996 - DNA, 18 bp, Artificial Sequence
  Synthetic sequence
tgattatttctgctgtgt

SEQ ID NO: 4997 - DNA, 18 bp, Artificial Sequence
  Synthetic sequence
tgattatttctgctgtgt

SEQ ID NO: 4998 - DNA, 18 bp, Artificial Sequence
  Synthetic sequence
tgattatttctgctgtgt

SEQ ID NO: 4999 - DNA, 18 bp, Artificial Sequence
  Synthetic sequence
tgattatttctgctgtgt

SEQ ID NO: 5000 - DNA, 20 bp, Artificial Sequence
  Synthetic sequence
tctgattatttctgctgtgt

SEQ ID NO: 5001 - DNA, 20 bp, Artificial Sequence
  Synthetic sequence
tctgattatttctgctgtgt

SEQ ID NO: 5002 - DNA, 20 bp, Artificial Sequence
  Synthetic sequence
tctgattatttctgctgtgt

SEQ ID NO: 5003 - DNA, 20 bp, Artificial Sequence
  Synthetic sequence
tctgattatttctgctgtgt

SEQ ID NO: 5004 - DNA, 20 bp, Artificial Sequence
  Synthetic sequence
tctgattatttctgctgtgt

SEQ ID NO: 5005 - DNA, 20 bp, Artificial Sequence
  Synthetic sequence
tctgattatttctgctgtgt

SEQ ID NO: 5006 - DNA, 19 bp, Artificial Sequence
  Synthetic sequence
tctgattatttctgctgtg

SEQ ID NO: 5007 - DNA, 19 bp, Artificial Sequence
  Synthetic sequence
tctgattatttctgctgtg

SEQ ID NO: 5008 - DNA, 19 bp, Artificial Sequence
  Synthetic sequence
tctgattatttctgctgtg

SEQ ID NO: 5009 - DNA, 19 bp, Artificial Sequence
  Synthetic sequence
ctgattatttctgctgtgt

SEQ ID NO: 5010 - DNA, 19 bp, Artificial Sequence
  Synthetic sequence
ctgattatttctgctgtgt

SEQ ID NO: 5011 - DNA, 19 bp, Artificial Sequence
  Synthetic sequence
ctgattatttctgctgtgt

SEQ ID NO: 5012 - DNA, 18 bp, Artificial Sequence
  Synthetic sequence
tctgattatttctgctgt

SEQ ID NO: 5013 - DNA, 18 bp, Artificial Sequence
  Synthetic sequence
tctgattatttctgctgt

SEQ ID NO: 5014 - DNA, 18 bp, Artificial Sequence
  Synthetic sequence
tctgattatttctgctgt

SEQ ID NO: 5015 - DNA, 18 bp, Artificial Sequence
  Synthetic sequence
tgattatttctgctgtgt

SEQ ID NO: 5016 - DNA, 18 bp, Artificial Sequence
  Synthetic sequence
tgattatttctgctgtgt

SEQ ID NO: 5017 - DNA, 18 bp, Artificial Sequence
  Synthetic sequence
tgattatttctgctgtgt

SEQ ID NO: 5018 - DNA, 17 bp, Artificial Sequence
  Synthetic sequence
tctgattatttctgctg

SEQ ID NO: 5019 - DNA, 17 bp, Artificial Sequence
  Synthetic sequence
tctgattatttctgctg

SEQ ID NO: 5020 - DNA, 17 bp, Artificial Sequence
  Synthetic sequence
tctgattatttctgctg

SEQ ID NO: 5021 - DNA, 17 bp, Artificial Sequence
  Synthetic sequence
gattatttctgctgtgt

SEQ ID NO: 5022 - DNA, 17 bp, Artificial Sequence
  Synthetic sequence
gattatttctgctgtgt

SEQ ID NO: 5023 - DNA, 17 bp, Artificial Sequence
  Synthetic sequence
gattatttctgctgtgt

SEQ ID NO: 5024 - DNA, 19 bp, Artificial Sequence
  Synthetic sequence
ctgattatttctgctgtgt

SEQ ID NO: 5025 - DNA, 19 bp, Artificial Sequence
  Synthetic sequence
ctgattatttctgctgtgt

SEQ ID NO: 5026 - DNA, 19 bp, Artificial Sequence
  Synthetic sequence
tctgattatttctgctgtg

SEQ ID NO: 5027 - DNA, 19 bp, Artificial Sequence
  Synthetic sequence
tctgattatttctgctgtg

SEQ ID NO: 5028 - DNA, 18 bp, Artificial Sequence
  Synthetic sequence
ctgattatttctgctgtg

SEQ ID NO: 5029 - DNA, 18 bp, Artificial Sequence
  Synthetic sequence
ctgattatttctgctgtg

SEQ ID NO: 5030 - DNA, 18 bp, Artificial Sequence
  Synthetic sequence
ctgattatttctgctgtg

SEQ ID NO: 5031 - DNA, 18 bp, Artificial Sequence
  Synthetic sequence
ctgattatttctgctgtg

SEQ ID NO: 5032 - DNA, 17 bp, Artificial Sequence
  Synthetic sequence
ctgattatttctgctgt

SEQ ID NO: 5033 - DNA, 17 bp, Artificial Sequence
  Synthetic sequence
ctgattatttctgctgt

SEQ ID NO: 5034 - DNA, 17 bp, Artificial Sequence
  Synthetic sequence
ctgattatttctgctgt

SEQ ID NO: 5035 - DNA, 20 bp, Artificial Sequence
  Synthetic sequence
tctgattatttctgctgtgt

SEQ ID NO: 5036 - DNA, 20 bp, Artificial Sequence
  Synthetic sequence
tctgattatttctgctgtgt

SEQ ID NO: 5037 - DNA, 20 bp, Artificial Sequence
  Synthetic sequence
tctgattatttctgctgtgt

SEQ ID NO: 5038 - DNA, 20 bp, Artificial Sequence
  Synthetic sequence
tctgattatttctgctgtgt

SEQ ID NO: 5039 - DNA, 19 bp, Artificial Sequence
  Synthetic sequence
tctgattatttctgctgtg

SEQ ID NO: 5040 - DNA, 19 bp, Artificial Sequence
  Synthetic sequence
ctgattatttctgctgtgt

SEQ ID NO: 5041 - DNA, 20 bp, Artificial Sequence
  Synthetic sequence
tctgattatttctgctgtgt

SEQ ID NO: 5042 - DNA, 20 bp, Artificial Sequence
  Synthetic sequence
tctgattatttctgctgtgt

SEQ ID NO: 5043 - DNA, 19 bp, Artificial Sequence
  Synthetic sequence
tctgattatttctgctgtg

SEQ ID NO: 5044 - DNA, 20 bp, Artificial Sequence
  Synthetic sequence
tctgattatttctgctgtgt

SEQ ID NO: 5045 - DNA, 18 bp, Artificial Sequence
  Synthetic sequence
tctgattatttctgctgt

SEQ ID NO: 5046 - DNA, 18 bp, Artificial Sequence
  Synthetic sequence
tgattatttctgctgtgt

SEQ ID NO: 5047 - DNA, 20 bp, Artificial Sequence
  Synthetic sequence
tctgattatttctgctgtgt

SEQ ID NO: 5048 - DNA, 19 bp, Artificial Sequence
  Synthetic sequence
tctgattatttctgctgtg

SEQ ID NO: 5049 - DNA, 18 bp, Artificial Sequence
  Synthetic sequence
tctgattatttctgctgt

SEQ ID NO: 5050 - DNA, 18 bp, Artificial Sequence
  Synthetic sequence
tgattatttctgctgtgt

SEQ ID NO: 5051 - DNA, 17 bp, Artificial Sequence
  Synthetic sequence
tctgattatttctgctg

SEQ ID NO: 5052 - DNA, 17 bp, Artificial Sequence
  Synthetic sequence
gattatttctgctgtgt

SEQ ID NO: 5053 - DNA, 19 bp, Artificial Sequence
  Synthetic sequence
ctgattatttctgctgtgt

SEQ ID NO: 5054 - DNA, 18 bp, Artificial Sequence
  Synthetic sequence
ctgattatttctgctgtg

SEQ ID NO: 5055 - DNA, 17 bp, Artificial Sequence
  Synthetic sequence
ctgattatttctgctgt

SEQ ID NO: 5056 - DNA, 20 bp, Artificial Sequence
  Synthetic sequence
tctgattatttctgctgtgt

SEQ ID NO: 5057 - DNA, 20 bp, Artificial Sequence
  Synthetic sequence
tctgattatttctgctgtgt

SEQ ID NO: 5058 - DNA, 20 bp, Artificial Sequence
  Synthetic sequence
tctgattatttctgctgtgt

SEQ ID NO: 5059 - DNA, 20 bp, Artificial Sequence
  Synthetic sequence
tctgattatttctgctgtgt

SEQ ID NO: 5060 - DNA, 20 bp, Artificial Sequence
  Synthetic sequence
tctgattatttctgctgtgt

SEQ ID NO: 5061 - DNA, 20 bp, Artificial Sequence
  Synthetic sequence
tctgattatttctgctgtgt

SEQ ID NO: 5062 - DNA, 20 bp, Artificial Sequence
  Synthetic sequence
tctgattatttctgctgtgt

SEQ ID NO: 5063 - DNA, 20 bp, Artificial Sequence
  Synthetic sequence
tctgattatttctgctgtgt

SEQ ID NO: 5064 - DNA, 20 bp, Artificial Sequence
  Synthetic sequence
tctgattatttctgctgtgt

SEQ ID NO: 5065 - DNA, 20 bp, Artificial Sequence
  Synthetic sequence
tctgattatttctgctgtgt

SEQ ID NO: 5066 - DNA, 20 bp, Artificial Sequence
  Synthetic sequence
tctgattatttctgctgtgt

SEQ ID NO: 5067 - DNA, 20 bp, Artificial Sequence
  Synthetic sequence
tctgattatttctgctgtgt

SEQ ID NO: 5068 - DNA, 20 bp, Artificial Sequence
  Synthetic sequence
tctgattatttctgctgtgt

SEQ ID NO: 5069 - DNA, 20 bp, Artificial Sequence
  Synthetic sequence
tctgattatttctgctgtgt

SEQ ID NO: 5070 - DNA, 20 bp, Artificial Sequence
  Synthetic sequence
tctgattatttctgctgtgt

SEQ ID NO: 5071 - DNA, 21 bp, Artificial Sequence
  Synthetic sequence
tctgattatttctgctgtgtc

SEQ ID NO: 5072 - DNA, 21 bp, Artificial Sequence
  Synthetic sequence
tctgattatttctgctgtgtc

SEQ ID NO: 5073 - DNA, 21 bp, Artificial Sequence
  Synthetic sequence
tctgattatttctgctgtgtc

SEQ ID NO: 5074 - DNA, 21 bp, Artificial Sequence
  Synthetic sequence
tctgattatttctgctgtgtc

SEQ ID NO: 5075 - DNA, 21 bp, Artificial Sequence
  Synthetic sequence
tctgattatttctgctgtgtc

SEQ ID NO: 5076 - DNA, 21 bp, Artificial Sequence
  Synthetic sequence
tctgattatttctgctgtgtc

SEQ ID NO: 5077 - DNA, 21 bp, Artificial Sequence
  Synthetic sequence
tctgattatttctgctgtgtc

SEQ ID NO: 5078 - DNA, 21 bp, Artificial Sequence
  Synthetic sequence
tctgattatttctgctgtgtc

SEQ ID NO: 5079 - DNA, 21 bp, Artificial Sequence
  Synthetic sequence
tctgattatttctgctgtgtc

SEQ ID NO: 5080 - DNA, 21 bp, Artificial Sequence
  Synthetic sequence
tctgattatttctgctgtgtc

SEQ ID NO: 5081 - DNA, 21 bp, Artificial Sequence
  Synthetic sequence
tctgattatttctgctgtgtc

SEQ ID NO: 5082 - DNA, 21 bp, Artificial Sequence
  Synthetic sequence
tctgattatttctgctgtgtc

SEQ ID NO: 5083 - DNA, 21 bp, Artificial Sequence
  Synthetic sequence
tctgattatttctgctgtgtc

SEQ ID NO: 5084 - DNA, 21 bp, Artificial Sequence
  Synthetic sequence
tctgattatttctgctgtgtc

SEQ ID NO: 5085 - DNA, 21 bp, Artificial Sequence
  Synthetic sequence
tctgattatttctgctgtgtc

SEQ ID NO: 5086 - DNA, 21 bp, Artificial Sequence
  Synthetic sequence
tctgattatttctgctgtgtc

SEQ ID NO: 5087 - DNA, 22 bp, Artificial Sequence
  Synthetic sequence
tctgattatttctgctgtgtca

SEQ ID NO: 5088 - DNA, 22 bp, Artificial Sequence
  Synthetic sequence
tctgattatttctgctgtgtca

SEQ ID NO: 5089 - DNA, 22 bp, Artificial Sequence
  Synthetic sequence
tctgattatttctgctgtgtca

SEQ ID NO: 5090 - DNA, 22 bp, Artificial Sequence
  Synthetic sequence
tctgattatttctgctgtgtca

SEQ ID NO: 5091 - DNA, 22 bp, Artificial Sequence
  Synthetic sequence
tctgattatttctgctgtgtca

SEQ ID NO: 5092 - DNA, 22 bp, Artificial Sequence
  Synthetic sequence
tctgattatttctgctgtgtca

SEQ ID NO: 5093 - DNA, 22 bp, Artificial Sequence
  Synthetic sequence
tctgattatttctgctgtgtca

SEQ ID NO: 5094 - DNA, 22 bp, Artificial Sequence
  Synthetic sequence
tctgattatttctgctgtgtca

SEQ ID NO: 5095 - DNA, 22 bp, Artificial Sequence
  Synthetic sequence
tctgattatttctgctgtgtca

SEQ ID NO: 5096 - DNA, 22 bp, Artificial Sequence
  Synthetic sequence
tctgattatttctgctgtgtca

SEQ ID NO: 5097 - DNA, 22 bp, Artificial Sequence
  Synthetic sequence
tctgattatttctgctgtgtca

SEQ ID NO: 5098 - DNA, 22 bp, Artificial Sequence
  Synthetic sequence
tctgattatttctgctgtgtca

SEQ ID NO: 5099 - DNA, 22 bp, Artificial Sequence
  Synthetic sequence
tctgattatttctgctgtgtca

SEQ ID NO: 5100 - DNA, 22 bp, Artificial Sequence
  Synthetic sequence
tctgattatttctgctgtgtca

SEQ ID NO: 5101 - DNA, 22 bp, Artificial Sequence
  Synthetic sequence
tctgattatttctgctgtgtca

SEQ ID NO: 5102 - DNA, 22 bp, Artificial Sequence
  Synthetic sequence
tctgattatttctgctgtgtca

SEQ ID NO: 5103 - DNA, 23 bp, Artificial Sequence
  Synthetic sequence
tctgattatttctgctgtgtcag

SEQ ID NO: 5104 - DNA, 23 bp, Artificial Sequence
  Synthetic sequence
tctgattatttctgctgtgtcag

SEQ ID NO: 5105 - DNA, 23 bp, Artificial Sequence
  Synthetic sequence
tctgattatttctgctgtgtcag

SEQ ID NO: 5106 - DNA, 23 bp, Artificial Sequence
  Synthetic sequence
tctgattatttctgctgtgtcag

SEQ ID NO: 5107 - DNA, 23 bp, Artificial Sequence
  Synthetic sequence
tctgattatttctgctgtgtcag

SEQ ID NO: 5108 - DNA, 23 bp, Artificial Sequence
  Synthetic sequence
tctgattatttctgctgtgtcag

SEQ ID NO: 5109 - DNA, 23 bp, Artificial Sequence
  Synthetic sequence
tctgattatttctgctgtgtcag

SEQ ID NO: 5110 - DNA, 23 bp, Artificial Sequence
  Synthetic sequence
tctgattatttctgctgtgtcag

SEQ ID NO: 5111 - DNA, 23 bp, Artificial Sequence
  Synthetic sequence
tctgattatttctgctgtgtcag

SEQ ID NO: 5112 - DNA, 23 bp, Artificial Sequence
  Synthetic sequence
tctgattatttctgctgtgtcag

SEQ ID NO: 5113 - DNA, 23 bp, Artificial Sequence
  Synthetic sequence
tctgattatttctgctgtgtcag

SEQ ID NO: 5114 - DNA, 23 bp, Artificial Sequence
  Synthetic sequence
tctgattatttctgctgtgtcag

SEQ ID NO: 5115 - DNA, 23 bp, Artificial Sequence
  Synthetic sequence
tctgattatttctgctgtgtcag

SEQ ID NO: 5116 - DNA, 23 bp, Artificial Sequence
  Synthetic sequence
tctgattatttctgctgtgtcag

SEQ ID NO: 5117 - DNA, 23 bp, Artificial Sequence
  Synthetic sequence
tctgattatttctgctgtgtcag

SEQ ID NO: 5118 - DNA, 23 bp, Artificial Sequence
  Synthetic sequence
tctgattatttctgctgtgtcag

SEQ ID NO: 5119 - DNA, 21 bp, Artificial Sequence
  Synthetic sequence
tctgattatttctgctgtgtc

SEQ ID NO: 5120 - DNA, 21 bp, Artificial Sequence
  Synthetic sequence
tctgattatttctgctgtgtc

SEQ ID NO: 5121 - DNA, 21 bp, Artificial Sequence
  Synthetic sequence
tctgattatttctgctgtgtc

SEQ ID NO: 5122 - DNA, 21 bp, Artificial Sequence
  Synthetic sequence
tctgattatttctgctgtgtc

SEQ ID NO: 5123 - DNA, 21 bp, Artificial Sequence
  Synthetic sequence
tctgattatttctgctgtgtc

SEQ ID NO: 5124 - DNA, 21 bp, Artificial Sequence
  Synthetic sequence
tctgattatttctgctgtgtc

SEQ ID NO: 5125 - DNA, 21 bp, Artificial Sequence
  Synthetic sequence
tctgattatttctgctgtgtc

SEQ ID NO: 5126 - DNA, 21 bp, Artificial Sequence
  Synthetic sequence
tctgattatttctgctgtgtc

SEQ ID NO: 5127 - DNA, 21 bp, Artificial Sequence
  Synthetic sequence
tctgattatttctgctgtgtc

SEQ ID NO: 5128 - DNA, 21 bp, Artificial Sequence
  Synthetic sequence
tctgattatttctgctgtgtc

SEQ ID NO: 5129 - DNA, 21 bp, Artificial Sequence
  Synthetic sequence
tctgattatttctgctgtgtc

SEQ ID NO: 5130 - DNA, 21 bp, Artificial Sequence
  Synthetic sequence
tctgattatttctgctgtgtc

SEQ ID NO: 5131 - DNA, 21 bp, Artificial Sequence
  Synthetic sequence
tctgattatttctgctgtgtc

SEQ ID NO: 5132 - DNA, 21 bp, Artificial Sequence
  Synthetic sequence
tctgattatttctgctgtgtc

SEQ ID NO: 5133 - DNA, 21 bp, Artificial Sequence
  Synthetic sequence
tctgattatttctgctgtgtc

SEQ ID NO: 5134 - DNA, 21 bp, Artificial Sequence
  Synthetic sequence
tctgattatttctgctgtgtc

SEQ ID NO: 5135 - DNA, 22 bp, Artificial Sequence
  Synthetic sequence
tctgattatttctgctgtgtca

SEQ ID NO: 5136 - DNA, 22 bp, Artificial Sequence
  Synthetic sequence
tctgattatttctgctgtgtca

SEQ ID NO: 5137 - DNA, 22 bp, Artificial Sequence
  Synthetic sequence
tctgattatttctgctgtgtca

SEQ ID NO: 5138 - DNA, 22 bp, Artificial Sequence
  Synthetic sequence
tctgattatttctgctgtgtca

SEQ ID NO: 5139 - DNA, 22 bp, Artificial Sequence
  Synthetic sequence
tctgattatttctgctgtgtca

SEQ ID NO: 5140 - DNA, 22 bp, Artificial Sequence
  Synthetic sequence
tctgattatttctgctgtgtca

SEQ ID NO: 5141 - DNA, 22 bp, Artificial Sequence
  Synthetic sequence
tctgattatttctgctgtgtca

SEQ ID NO: 5142 - DNA, 22 bp, Artificial Sequence
  Synthetic sequence
tctgattatttctgctgtgtca

SEQ ID NO: 5143 - DNA, 22 bp, Artificial Sequence
  Synthetic sequence
tctgattatttctgctgtgtca

SEQ ID NO: 5144 - DNA, 22 bp, Artificial Sequence
  Synthetic sequence
tctgattatttctgctgtgtca

SEQ ID NO: 5145 - DNA, 22 bp, Artificial Sequence
  Synthetic sequence
tctgattatttctgctgtgtca

SEQ ID NO: 5146 - DNA, 22 bp, Artificial Sequence
  Synthetic sequence
tctgattatttctgctgtgtca

SEQ ID NO: 5147 - DNA, 22 bp, Artificial Sequence
  Synthetic sequence
tctgattatttctgctgtgtca

SEQ ID NO: 5148 - DNA, 22 bp, Artificial Sequence
  Synthetic sequence
tctgattatttctgctgtgtca

SEQ ID NO: 5149 - DNA, 22 bp, Artificial Sequence
  Synthetic sequence
tctgattatttctgctgtgtca

SEQ ID NO: 5150 - DNA, 22 bp, Artificial Sequence
  Synthetic sequence
tctgattatttctgctgtgtca

SEQ ID NO: 5151 - DNA, 4472 bp, Artificial Sequence
  MSH3 mRNA NM_002439.4
ccgcagacgcctgggaactgcggccgcgggctcgcgctcctcgccaggccctgccgccgggctgccatccttgccctgccatgtctcgccggaagcctgcgtcgggcggcctcgctgcctccagctcagcccctgcgaggcaagcggttttgagccgattcttccagtctacgggaagcctgaaatccacctcctcctccacaggtgcagccgaccaggtggaccctggcgctgcagcggctgcagcggccgcagcggccgcagcgcccccagcgcccccagctcccgccttcccgccccagctgccgccgcacatagctacagaaattgacagaagaaagaagagaccattggaaaatgatgggcctgttaaaaagaaagtaaagaaagtccaacaaaaggaaggaggaagtgatctgggaatgtctggcaactctgagccaaagaaatgtctgaggaccaggaatgtttcaaagtctctggaaaaattgaaagaattctgctgcgattctgcccttcctcaaagtagagtccagacagaatctctgcaggagagatttgcagttctgccaaaatgtactgattttgatgatatcagtcttctacacgcaaagaatgcagtttcttctgaagattcgaaacgtcaaattaatcaaaaggacacaacactttttgatctcagtcagtttggatcatcaaatacaagtcatgaaaatttacagaaaactgcttccaaatcagctaacaaacggtccaaaagcatctatacgccgctagaattacaatacatagaaatgaagcagcagcacaaagatgcagttttgtgtgtggaatgtggatataagtatagattctttggggaagatgcagagattgcagcccgagagctcaatatttattgccatttagatcacaactttatgacagcaagtatacctactcacagactgtttgttcatgtacgccgcctggtggcaaaaggatataaggtgggagttgtgaagcaaactgaaactgcagcattaaaggccattggagacaacagaagttcactcttttcccggaaattgactgccctttatacaaaatctacacttattggagaagatgtgaatcccctaatcaagctggatgatgctgtaaatgttgatgagataatgactgatacttctaccagctatcttctgtgcatctctgaaaataaggaaaatgttagggacaaaaaaaagggcaacatttttattggcattgtgggagtgcagcctgccacaggcgaggttgtgtttgatagtttccaggactctgcttctcgttcagagctagaaacccggatgtcaagcctgcagccagtagagctgctgcttccttcggccttgtccgagcaaacagaggcgctcatccacagagccacatctgttagtgtgcaggatgacagaattcgagtcgaaaggatggataacatttattttgaatacagccatgctttccaggcagttacagagttttatgcaaaagatacagttgacatcaaaggttctcaaattatttctggcattgttaacttagagaagcctgtgatttgctctttggctgccatcataaaatacctcaaagaattcaacttggaaaagatgctctccaaacctgagaattttaaacagctatcaagtaaaatggaatttatgacaattaatggaacaacattaaggaatctggaaatcctacagaatcagactgatatgaaaaccaaaggaagtttgctgtgggttttagaccacactaaaacttcatttgggagacggaagttaaagaagtgggtgacccagccactccttaaattaagggaaataaatgcccggcttgatgctgtatcggaagttctccattcagaatctagtgtgtttggtcagatagaaaatcatctacgtaaattgcccgacatagagaggggactctgtagcatttatcacaaaaaatgttctacccaagagttcttcttgattgtcaaaactttatatcacctaaagtcagaatttcaagcaataatacctgctgttaattcccacattcagtcagacttgctccggaccgttattttagaaattcctgaactcctcagtccagtggagcattacttaaagatactcaatgaacaagctgccaaagttggggataaaactgaattatttaaagacctttctgacttccctttaataaaaaagaggaaggatgaaattcaaggtgttattgacgagatccgaatgcatttgcaagaaatacgaaaaatactaaaaaatccttctgcacaatatgtgacagtatcaggacaggagtttatgatagaaataaagaactctgctgtatcttgtataccaactgattgggtaaaggttggaagcacaaaagctgtgagccgctttcactctccttttattgtagaaaattacagacatctgaatcagctccgggagcagctagtccttgactgcagtgctgaatggcttgattttctagagaaattcagtgaacattatcactccttgtgtaaagcagtgcatcacctagcaactgttgactgcattttctccctggccaaggtcgctaagcaaggagattactgcagaccaactgtacaagaagaaagaaaaattgtaataaaaaatggaaggcaccctgtgattgatgtgttgctgggagaacaggatcaatatgtcccaaataatacagatttatcagaggactcagagagagtaatgataattaccggaccaaacatgggtggaaagagctcctacataaaacaagttgcattgattaccatcatggctcagattggctcctatgttcctgcagaagaagcgacaattgggattgtggatggcattttcacaaggatgggtgctgcagacaatatatataaaggacagagtacatttatggaagaactgactgacacagcagaaataatcagaaaagcaacatcacagtccttggttatcttggatgaactaggaagagggacgagcactcatgatggaattgccattgcctatgctacacttgagtatttcatcagagatgtgaaatccttaaccctgtttgtcacccattatccgccagtttgtgaactagaaaaaaattactcacaccaggtggggaattaccacatgggattcttggtcagtgaggatgaaagcaaactggatccaggcgcagcagaacaagtccctgattttgtcaccttcctttaccaaataactagaggaattgcagcaaggagttatggattaaatgtggctaaactagcagatgttcctggagaaattttgaagaaagcagctcacaagtcaaaagagctggaaggattaataaatacgaaaagaaagagactcaagtattttgcaaagttatggacgatgcataatgcacaagacctgcagaagtggacagaggagttcaacatggaagaaacacagacttctcttcttcattaaaatgaagactacatttgtgaacaaaaaatggagaattaaaaataccaactgtacaaaataactctccagtaacagcctatctttgtgtgacatgtgagcataaaattatgaccatggtatattcctattggaaacagagaggtttttctgaagacagtctttttcaagtttctgtcttcctaacttttctacgtataaacactcttgaatagacttccactttgtaattagaaaattttatggacagtaagtccagtaaagccttaagtggcagaatataattcccaagcttttggagggtgatataaaaatttacttgatatttttatttgtttcagttcagataattggcaactgggtgaatctggcaggaatctatccattgaactaaaataattttattatgcaaccagtttatccaccaagaacataagaattttttataagtagaaagaattggccaggcatggtggctcatgcctgtaatcccagcactttgggaggccaaggtaggcagatcacctgaggtcaggagttcaagaccagcctggccaacatggcaaaaccccatctttactaaaaatataaagtacatctctactaaaaatacgaaaaaattagctgggcatggtggcgcacacctgtagtcccagctactccggaggctgaggcaggagaatctcttgaacctgggaggcggaggttgcaatgagccgagatcacgtcactgcactccagcttgggcaacagagcaagactccatctcaaaaaaaaaaaaagaaaaaagaaaagaaatagaattatcaagcttttaaaaactagagcacagaaggaataaggtcatgaaatttaaaaggttaaatattgtcataggattaagcagtttaaagattgttggatgaaattatttgtcattcattcaagtaataaatatttaatgaatacttgctataaaaaaaaaaaaaaaaaaaaaaaaaa

SEQ ID NO: 5152 - DNA, 20 bp, Artificial Sequence
  Synthetic sequence
taaatattgagctctcgggc

SEQ ID NO: 5153 - DNA, 20 bp, Artificial Sequence
  Synthetic sequence
aaacagtctgtgagtaggta

SEQ ID NO: 5154 - DNA, 20 bp, Artificial Sequence
  Synthetic sequence
tccgggtttctagctctgaa

SEQ ID NO: 5155 - DNA, 20 bp, Artificial Sequence
  Synthetic sequence
atccgggtttctagctctga

SEQ ID NO: 5156 - DNA, 20 bp, Artificial Sequence
  Synthetic sequence
catccgggtttctagctctg

SEQ ID NO: 5157 - DNA, 20 bp, Artificial Sequence
  Synthetic sequence
tggcagcttgttcattgagt

SEQ ID NO: 5158 - DNA, 20 bp, Artificial Sequence
  Synthetic sequence
ctttggcagcttgttcattg

SEQ ID NO: 5159 - DNA, 20 bp, Artificial Sequence
  Synthetic sequence
gtatttttcgtatttcttgc

SEQ ID NO: 5160 - DNA, 20 bp, Artificial Sequence
  Synthetic sequence
ctaggtgatgcactgcttta

SEQ ID NO: 5161 - DNA, 20 bp, Artificial Sequence
  Synthetic sequence
gctaggtgatgcactgcttt

SEQ ID NO: 5162 - DNA, 20 bp, Artificial Sequence
  Synthetic sequence
caacagttgctaggtgatgc

SEQ ID NO: 5163 - DNA, 20 bp, Artificial Sequence
  Synthetic sequence
gtcaacagttgctaggtgat

SEQ ID NO: 5164 - DNA, 20 bp, Artificial Sequence
  Synthetic sequence
ttcttcttgtacagttggtc

SEQ ID NO: 5165 - DNA, 20 bp, Artificial Sequence
  Synthetic sequence
ctttcttcttgtacagttgg

SEQ ID NO: 5166 - DNA, 20 bp, Artificial Sequence
  Synthetic sequence
tgatcctgttctcccagcaa

SEQ ID NO: 5167 - DNA, 20 bp, Artificial Sequence
  Synthetic sequence
gagctctttccacccatgtt

SEQ ID NO: 5168 - DNA, 20 bp, Artificial Sequence
  Synthetic sequence
ggagctctttccacccatgt

SEQ ID NO: 5169 - DNA, 20 bp, Artificial Sequence
  Synthetic sequence
tggtaatcaatgcaacttgt

SEQ ID NO: 5170 - DNA, 20 bp, Artificial Sequence
  Synthetic sequence
agccaatctgagccatgatg

SEQ ID NO: 5171 - DNA, 20 bp, Artificial Sequence
  Synthetic sequence
gagccaatctgagccatgat

SEQ ID NO: 5172 - DNA, 20 bp, Artificial Sequence
  Synthetic sequence
taggagccaatctgagccat

SEQ ID NO: 5173 - DNA, 20 bp, Artificial Sequence
  Synthetic sequence
gtcgcttcttctgcaggaac

SEQ ID NO: 5174 - DNA, 20 bp, Artificial Sequence
  Synthetic sequence
tgtcgcttcttctgcaggaa

SEQ ID NO: 5175 - DNA, 20 bp, Artificial Sequence
  Synthetic sequence
ttgtcgcttcttctgcagga

SEQ ID NO: 5176 - DNA, 20 bp, Artificial Sequence
  Synthetic sequence
tctgattatttctgctgtgt

1. A single-stranded oligonucleotide of 15-30 linked nucleotides in length, wherein the oligonucleotide, or a portion thereof, is at least 95% complementary to at least 15 contiguous nucleobases at positions 876-901 of SEQ ID NO: 5151, or a pharmaceutically acceptable salt thereof.

2. The oligonucleotide of claim 1, wherein the oligonucleotide, or a portion thereof, is at least 98% complementary to at least 15 contiguous nucleobases at positions 876-901 of SEQ ID NO: 5151, or a pharmaceutically acceptable salt thereof.

3. The oligonucleotide of claim 1, wherein the oligonucleotide, or a portion thereof, is at least 99% complementary to at least 15 contiguous nucleobases at positions 876-901 of SEQ ID NO: 5151, or a pharmaceutically acceptable salt thereof.

4. The oligonucleotide of claim 1, wherein the oligonucleotide, or a portion thereof, is 100% complementary to at least 15 contiguous nucleobases at positions 876-901 of SEQ ID NO: 5151, or a pharmaceutically acceptable salt thereof.

5. The oligonucleotide of any one of claims 1-5, wherein the oligonucleotide, or a portion thereof, is complementary to 17-23 contiguous nucleobases at positions 876-901 of SEQ ID NO: 5151, or a pharmaceutically acceptable salt thereof.

6. The oligonucleotide of any one of claims 1-5, wherein the oligonucleotide, or a portion thereof, is complementary to 17-20 contiguous nucleobases at positions 876-901 of SEQ ID NO: 5151, or a pharmaceutically acceptable salt thereof.

7. The oligonucleotide of any one of claims 1-6, wherein the 17-20 contiguous nucleobases begin at position 876, 877, 878, 879, 880, 881, 882, 883, 884, or 885 of SEQ ID NO: 5151, or a pharmaceutically acceptable salt thereof.

8. The oligonucleotide of any one of claims 1-7, wherein the oligonucleotide is 17-20 linked nucleotides in length, or a pharmaceutically acceptable salt thereof.

9. The oligonucleotide of any one of claims 1-5, wherein the oligonucleotide, or a portion thereof, is complementary to 20-23 contiguous nucleobases at positions 876-901 of SEQ ID NO: 5151, or a pharmaceutically acceptable salt thereof.

10. The oligonucleotide of claim 9, wherein the 20-23 contiguous nucleobases begin at position 876, 877, 878, 879, 880, 881, or 882 of SEQ ID NO: 5151, or a pharmaceutically acceptable salt thereof.

11. The oligonucleotide of any one of claims 1-10, wherein the oligonucleotide is 20-23 linked nucleotides in length, or a pharmaceutically acceptable salt thereof.

12. A single-stranded oligonucleotide of 15-30 linked nucleotides in length, wherein the oligonucleotide, or a portion thereof, is at least 95% complementary to at least 15 contiguous nucleobases at positions 931-956 of SEQ ID NO: 5151, or a pharmaceutically acceptable salt thereof.

13. The oligonucleotide of claim 12, wherein the oligonucleotide, or a portion thereof, is at least 98% complementary to at least 15 contiguous nucleobases at positions 931-956 of SEQ ID NO: 5151, or a pharmaceutically acceptable salt thereof.

14. The oligonucleotide of claim 12, wherein the oligonucleotide, or a portion thereof, is at least 99% complementary to at least 15 contiguous nucleobases at positions 931-956 of SEQ ID NO: 5151, or a pharmaceutically acceptable salt thereof.

15. The oligonucleotide of claim 12, wherein the oligonucleotide, or a portion thereof, is 100% complementary to at least 15 contiguous nucleobases at positions 931-956 of SEQ ID NO: 5151, or a pharmaceutically acceptable salt thereof.

16. The oligonucleotide of any one of claims 12-15, wherein the oligonucleotide, or a portion thereof, is complementary to 17-23 contiguous nucleobases at positions 931-956 of SEQ ID NO: 5151, or a pharmaceutically acceptable salt thereof.

17. The oligonucleotide of any one of claims 12-15, wherein the oligonucleotide, or a portion thereof, is complementary to 17-20 contiguous nucleobases at positions 931-956 of SEQ ID NO: 5151, or a pharmaceutically acceptable salt thereof.

18. The oligonucleotide of claim 17, wherein the oligonucleotide, or a portion thereof, is complementary to 17-20 contiguous nucleobases beginning at position 931, 932, 933, 934, 935, 936, 937, 938, 939, or 940 of SEQ ID NO: 5151, or a pharmaceutically acceptable salt thereof.

19. The oligonucleotide of any one of claims 12-18, wherein the oligonucleotide is 17-20 linked nucleotides in length, or a pharmaceutically acceptable salt thereof.

20. The oligonucleotide of any one of claims 12-15, wherein the oligonucleotide, or a portion thereof, is complementary to 20-23 contiguous nucleobases at positions 931-956 of SEQ ID NO: 5151, or a pharmaceutically acceptable salt thereof.

21. The oligonucleotide of claim 20, wherein the oligonucleotide, or a portion thereof, is complementary to 20-23 contiguous nucleobases beginning at position 931, 932, 933, 934, 935, 936, 937 of SEQ ID NO: 5151, or a pharmaceutically acceptable salt thereof.

22. The oligonucleotide of any one of claims 12-21, wherein the oligonucleotide is 20-23 linked nucleotides in length, or a pharmaceutically acceptable salt thereof.

23. A single-stranded oligonucleotide of 15-30 linked nucleotides in length, wherein the oligonucleotide, or a portion thereof, is at least 95% complementary to at least 15 contiguous nucleobases at positions 1310-1337 of SEQ ID NO: 5151, or a pharmaceutically acceptable salt thereof.

24. The oligonucleotide of claim 23, wherein the oligonucleotide, or a portion thereof, is at least 98% complementary to at least 15 contiguous nucleobases at positions 1310-1337 of SEQ ID NO: 5151, or a pharmaceutically acceptable salt thereof.

25. The oligonucleotide of claim 23, wherein the oligonucleotide, or a portion thereof, is at least 99% complementary to at least 15 contiguous nucleobases at positions 1310-1337 of SEQ ID NO: 5151, or a pharmaceutically acceptable salt thereof.

26. The oligonucleotide of claim 23, wherein the oligonucleotide, or a portion thereof, is 100% complementary to at least 15 contiguous nucleobases at positions 1310-1337 of SEQ ID NO: 5151, or a pharmaceutically acceptable salt thereof.

27. The oligonucleotide of any one of claims 23-26, wherein the oligonucleotide, or a portion thereof, is complementary to 17-23 contiguous nucleobases at positions 1310-1337 of SEQ ID NO: 5151, or a pharmaceutically acceptable salt thereof.

28. The oligonucleotide of any one of claims 23-26, wherein the oligonucleotide, or a portion thereof, is complementary to 17-20 contiguous nucleobases at positions 1310-1337 of SEQ ID NO: 5151, or a pharmaceutically acceptable salt thereof.

29. The oligonucleotide of any one of claims 23-28, wherein the oligonucleotide, or a portion thereof, is complementary to 17-20 contiguous nucleobases beginning at position 1310, 1311, 1312, 1313, 1314, 1315, 1316, 1317, 1318, 1319, 1320, or 1321 of SEQ ID NO: 5151, or a pharmaceutically acceptable salt thereof.

30. The oligonucleotide of claim 29, wherein the oligonucleotide is 17-20 linked nucleotides in length, or a pharmaceutically acceptable salt thereof.

31. The oligonucleotide of any one of claims 23-26, wherein the oligonucleotide, or a portion thereof, is complementary to 20-23 contiguous nucleobases at positions 1310-1337 of SEQ ID NO: 5151, or a pharmaceutically acceptable salt thereof.

32. The oligonucleotide of 31, wherein the oligonucleotide, or a portion thereof, is complementary to 20-23 contiguous nucleobases beginning at position 1310, 1311, 1312, 1313, 1314, 1315, 1316, 1317, or 1318 of SEQ ID NO: 5151, or a pharmaceutically acceptable salt thereof.

33. The oligonucleotide of any one of claims 23-32, wherein the oligonucleotide is 20-23 linked nucleotides in length, or a pharmaceutically acceptable salt thereof.

34. A single-stranded oligonucleotide of 15-30 linked nucleotides in length, wherein the oligonucleotide, or a portion thereof, is at least 95% complementary to at least 15 contiguous nucleobases at positions 2141-2169 of SEQ ID NO: 5151, or a pharmaceutically acceptable salt thereof.

35. The oligonucleotide of claim 34, wherein the oligonucleotide, or a portion thereof, is at least 98% complementary to at least 15 contiguous nucleobases at positions 2141-2169 of SEQ ID NO: 5151, or a pharmaceutically acceptable salt thereof.

36. The oligonucleotide of claim 34, wherein the oligonucleotide, or a portion thereof, is at least 99% complementary to at least 15 contiguous nucleobases at positions 2141-2169 of SEQ ID NO: 5151, or a pharmaceutically acceptable salt thereof.

37. The oligonucleotide of claim 34, wherein the oligonucleotide, or a portion thereof, is 100% complementary to at least 15 contiguous nucleobases at positions 2141-2169 of SEQ ID NO: 5151, or a pharmaceutically acceptable salt thereof.

38. The oligonucleotide of any one of claims 34-37, wherein the oligonucleotide, or a portion thereof, is complementary to 17-23 contiguous nucleobases at positions 2141-2169 of SEQ ID NO: 5151, or a pharmaceutically acceptable salt thereof.

39. The oligonucleotide of any one of claims 34-37, wherein the oligonucleotide, or a portion thereof, is complementary to 17-20 contiguous nucleobases at positions 2141-2169 of SEQ ID NO: 5151, or a pharmaceutically acceptable salt thereof.

40. The oligonucleotide of claim 39, wherein the oligonucleotide, or a portion thereof, is complementary to 17-20 contiguous nucleobases beginning at position 2141, 2142, 2143, 2144, 2145, 2146, 2147, 2148, 2149, 2150, 2151, 2152, or 2153 of SEQ ID NO: 5151, or a pharmaceutically acceptable salt thereof.

41. The oligonucleotide of any one of claims 34-40, wherein the oligonucleotide is 17-20 linked nucleotides in length, or a pharmaceutically acceptable salt thereof.

42. The oligonucleotide of any one of claims 34-37, wherein the oligonucleotide, or a portion thereof, is complementary to 20-23 contiguous nucleobases at positions 2141-2169 of SEQ ID NO: 5151, or a pharmaceutically acceptable salt thereof.

43. The oligonucleotide of 42, wherein the oligonucleotide, or a portion thereof, is complementary to 20-23 contiguous nucleobases beginning at position 2141, 2142, 2143, 2144, 2145, 2146, 2147, 2148, 2149, or 2150 of SEQ ID NO: 5151, or a pharmaceutically acceptable salt thereof.

44. The oligonucleotide of any one of claims 34-43, wherein the oligonucleotide is 20-23 linked nucleotides in length, or a pharmaceutically acceptable salt thereof.

45. A single-stranded oligonucleotide of 15-30 linked nucleotides in length, wherein the oligonucleotide, or a portion thereof, is at least 95% complementary to at least 15 contiguous nucleobases at positions 2267-2292 of SEQ ID NO: 5151, or a pharmaceutically acceptable salt thereof.

46. The oligonucleotide of claim 45, wherein the oligonucleotide, or a portion thereof, is at least 98% complementary to at least 15 contiguous nucleobases at positions 2267-2292 of SEQ ID NO: 5151, or a pharmaceutically acceptable salt thereof.

47. The oligonucleotide of claim 45, wherein the oligonucleotide, or a portion thereof, is at least 99% complementary to at least 15 contiguous nucleobases at positions 2267-2292 of SEQ ID NO: 5151, or a pharmaceutically acceptable salt thereof.

48. The oligonucleotide of claim 45, wherein the oligonucleotide, or a portion thereof, is 100% complementary to at least 15 contiguous nucleobases at positions 2267-2292 of SEQ ID NO: 5151, or a pharmaceutically acceptable salt thereof.

49. The oligonucleotide of any one of claims 45-48, wherein the oligonucleotide, or a portion thereof, is complementary to 17-23 contiguous nucleobases at positions 2267-2292 of SEQ ID NO: 5151, or a pharmaceutically acceptable salt thereof.

50. The oligonucleotide of any one of claims 45-48, wherein the oligonucleotide, or a portion thereof, is complementary to 17-20 contiguous nucleobases at positions 2267-2292 of SEQ ID NO: 5151, or a pharmaceutically acceptable salt thereof.

51. The oligonucleotide of claim 50, wherein the oligonucleotide, or a portion thereof, is complementary to 17-20 contiguous nucleobases beginning at position 2267, 2268, 2269, 2270, 2271, 2272, 2273, 2274, 2275, or 2276 of SEQ ID NO: 5151, or a pharmaceutically acceptable salt thereof.

52. The oligonucleotide of any one of claims 45-51, wherein the oligonucleotide is 17-20 linked nucleotides in length, or a pharmaceutically acceptable salt thereof.

53. The oligonucleotide of any one of claims 45-48, wherein the oligonucleotide, or a portion thereof, is complementary to 20-23 contiguous nucleobases at positions 2267-2292 of SEQ ID NO: 5151, or a pharmaceutically acceptable salt thereof.

54. The oligonucleotide of 53, wherein the oligonucleotide, or a portion thereof, is complementary to 20-23 contiguous nucleobases beginning at position 2267, 2268, 2269, 2270, 2271, 2272, or 2273 of SEQ ID NO: 5151, or a pharmaceutically acceptable salt thereof.

55. The oligonucleotide of any one of claims 45-54, wherein the oligonucleotide is 20-23 linked nucleotides in length, or a pharmaceutically acceptable salt thereof.

56. A single-stranded oligonucleotide of 15-30 linked nucleotides in length, wherein the oligonucleotide is at least 95% complementary to at least 15 contiguous nucleobases at positions 2543-2579 of SEQ ID NO: 5151, or a pharmaceutically acceptable salt thereof.

57. The oligonucleotide of claim 56, wherein the oligonucleotide, or a portion thereof, is at least 98% complementary to at least 15 contiguous nucleobases at positions 2543-2579 of SEQ ID NO: 5151, or a pharmaceutically acceptable salt thereof.

58. The oligonucleotide of claim 56, wherein the oligonucleotide, or a portion thereof, is at least 99% complementary to at least 15 contiguous nucleobases at positions 2543-2579 of SEQ ID NO: 5151, or a pharmaceutically acceptable salt thereof.

59. The oligonucleotide of claim 56, wherein the oligonucleotide, or a portion thereof, is 100% complementary to at least 15 contiguous nucleobases at positions 2543-2579 of SEQ ID NO: 5151, or a pharmaceutically acceptable salt thereof.

60. The oligonucleotide of any one of claims 56-59, wherein the oligonucleotide, or a portion thereof, is complementary to 17-23 contiguous nucleobases at positions 2543-2579 of SEQ ID NO: 5151, or a pharmaceutically acceptable salt thereof.

61. The oligonucleotide of any one of claims 56-59, wherein the oligonucleotide, or a portion thereof, is complementary to 17-20 contiguous nucleobases at positions 2543-2579 of SEQ ID NO: 5151, or a pharmaceutically acceptable salt thereof.

62. The oligonucleotide of claim 61, wherein the oligonucleotide, or a portion thereof, is complementary to 17-20 contiguous nucleobases beginning at position 2543, 2544, 2545, 2546, 2547, 2548, 2549, 2550, 2551, 2552, 2553, 2554, 2555, 2556, 2557, 2558, 2559, 2560, 2561, 2562, or 2563 of SEQ ID NO: 5151, or a pharmaceutically acceptable salt thereof.

63. The oligonucleotide of any one of claims 56-62, wherein the oligonucleotide is 17-20 linked nucleotides in length, or a pharmaceutically acceptable salt thereof.

64. The oligonucleotide of any one of claims 56-59, wherein the oligonucleotide, or a portion thereof, is complementary to 20-23 contiguous nucleobases at positions 2543-2579 of SEQ ID NO: 5151, or a pharmaceutically acceptable salt thereof.

65. The oligonucleotide of 64, wherein the oligonucleotide is complementary to 20-23 contiguous nucleobases beginning at position 2543, 2544, 2545, 2546, 2547, 2548, 2549, 2550, 2551, 2552, 2553, 2554, 2555, 2556, 2557, 2558, 2559, or 2560 of SEQ ID NO:
5151, or a pharmaceutically acceptable salt thereof.

66. The oligonucleotide of any one of claims 56-65, wherein the oligonucleotide is 20-23 linked nucleotides in length, or a pharmaceutically acceptable salt thereof.

67. A single-stranded oligonucleotide of 15-30 linked nucleotides in length, wherein the oligonucleotide, or a portion thereof, is at least 95% complementary to at least 15 contiguous nucleobases at positions 2141-2169 of SEQ ID NO: 5151, or a pharmaceutically acceptable salt thereof.

68. The oligonucleotide of claim 67, wherein the oligonucleotide, or a portion thereof, is at least 98% complementary to at least 15 contiguous nucleobases at positions 2141-2169 of SEQ ID NO: 5151, or a pharmaceutically acceptable salt thereof.

69. The oligonucleotide of claim 67, wherein the oligonucleotide, or a portion thereof, is at least 99% complementary to at least 15 contiguous nucleobases at positions 2141-2169 of SEQ ID NO: 5151, or a pharmaceutically acceptable salt thereof.

70. The oligonucleotide of claim 67, wherein the oligonucleotide, or a portion thereof, is 100% complementary to at least 15 contiguous nucleobases at positions 2141-2169 of SEQ ID NO: 5151, or a pharmaceutically acceptable salt thereof.

71. The oligonucleotide of any one of claims 67-70, wherein the oligonucleotide, or a portion thereof, is complementary to 17-23 contiguous nucleobases at positions 2141-2169 of SEQ ID NO: 5151, or a pharmaceutically acceptable salt thereof.

72. The oligonucleotide of any one of claims 67-70, wherein the oligonucleotide, or a portion thereof, is complementary to 17-20 contiguous nucleobases at positions 2141-2169 of SEQ ID NO: 5151, or a pharmaceutically acceptable salt thereof.

73. The oligonucleotide of claim 72, wherein the oligonucleotide, or a portion thereof, is complementary to 17-20 contiguous nucleobases beginning at position 2141, 2142, 2143, 2144, 2145, 2146, 2147, 2148, 2149, 2150, 2151, 2152, or 2153 of SEQ ID NO: 5151, or a pharmaceutically acceptable salt thereof.

74. The oligonucleotide of claim 73, wherein the oligonucleotide is 17-20 linked nucleotides in length, or a pharmaceutically acceptable salt thereof.

75. The oligonucleotide of any one of claims 67-70, wherein the oligonucleotide, or a portion thereof, is complementary to 20-23 contiguous nucleobases at positions 2141-2169 of SEQ ID NO: 5151, or a pharmaceutically acceptable salt thereof.

76. The oligonucleotide of 75, wherein the oligonucleotide, or a portion thereof, is complementary to 20-23 contiguous nucleobases beginning at position 2141, 2142, 2143, 2144, 2145, 2146, 2147, 2148, or 2149 of SEQ ID NO: 5151, or a pharmaceutically acceptable salt thereof.

77. The oligonucleotide of any one of claims 67-76, wherein the oligonucleotide is 20-23 linked nucleotides in length, or a pharmaceutically acceptable salt thereof.

78. A single-stranded oligonucleotide of 15-30 linked nucleotides in length, wherein the oligonucleotide, or a portion thereof, is at least 95% complementary to at least 15 contiguous nucleobases at positions 2267-2292 of SEQ ID NO: 5151, or a pharmaceutically acceptable salt thereof.

79. The oligonucleotide of claim 78, wherein the oligonucleotide, or a portion thereof, is at least 98% complementary to at least 15 contiguous nucleobases at positions 2267-2292 of SEQ ID NO: 5151, or a pharmaceutically acceptable salt thereof.

80. The oligonucleotide of claim 78, wherein the oligonucleotide, or a portion thereof, is at least 99% complementary to at least 15 contiguous nucleobases at positions 2267-2292 of SEQ ID NO: 5151, or a pharmaceutically acceptable salt thereof.

81. The oligonucleotide of claim 78, wherein the oligonucleotide, or a portion thereof, is 100% complementary to at least 15 contiguous nucleobases at positions 2267-2292 of SEQ ID NO: 5151, or a pharmaceutically acceptable salt thereof.

82. The oligonucleotide of any one of claims 78-81, wherein the oligonucleotide, or a portion thereof, is complementary to 17-23 contiguous nucleobases at positions 2267-2292 of SEQ ID NO: 5151, or a pharmaceutically acceptable salt thereof.

83. The oligonucleotide of any one of claims 78-81, wherein the oligonucleotide, or a portion thereof, is complementary to 17-20 contiguous nucleobases at positions 2267-2292 of SEQ ID NO: 5151, or a pharmaceutically acceptable salt thereof.

84. The oligonucleotide of any one of claims 78-84, wherein the oligonucleotide, or a portion thereof, is complementary to 17-20 contiguous nucleobases beginning at position 2267, 2268, 2269, 2270, 2271, 2272, 2273, 2274, 2275, or 2276 of SEQ ID NO: 5151, or a pharmaceutically acceptable salt thereof.

85. The oligonucleotide of claim 78-84, wherein the oligonucleotide is 17-20 linked nucleotides in length, or a pharmaceutically acceptable salt thereof.

86. The oligonucleotide of any one of claims 78-81, wherein the oligonucleotide, or a portion thereof, is complementary to 20-23 contiguous nucleobases at positions 2267-2292 of SEQ ID NO: 5151, or a pharmaceutically acceptable salt thereof.

87. The oligonucleotide of 86, wherein the oligonucleotide, or a portion thereof, is complementary to 20-23 contiguous nucleobases beginning at position 2267, 2268, 2269, 2270, 2271, or 2272 of SEQ ID NO: 5151, or a pharmaceutically acceptable salt thereof.

88. The oligonucleotide of any one of claims 78-87, wherein the oligonucleotide is 20-23 linked nucleotides in length, or a pharmaceutically acceptable salt thereof.

89. A single-stranded oligonucleotide of 15-30 linked nucleotides in length, wherein the oligonucleotide, or a portion thereof, is at least 95% complementary to at least 15 contiguous nucleobases at positions 2620-2647 of SEQ ID NO: 5151, or a pharmaceutically acceptable salt thereof.

90. The oligonucleotide of claim 89, wherein the oligonucleotide, or a portion thereof, is at least 98% complementary to at least 15 contiguous nucleobases at positions 2620-2647 of SEQ ID NO: 5151, or a pharmaceutically acceptable salt thereof.

91. The oligonucleotide of claim 89, wherein the oligonucleotide, or a portion thereof, is at least 99% complementary to at least 15 contiguous nucleobases at positions 2620-2647 of SEQ ID NO: 5151, or a pharmaceutically acceptable salt thereof.

92. The oligonucleotide of claim 89, wherein the oligonucleotide, or a portion thereof, is 100% complementary to at least 15 contiguous nucleobases at positions 2620-2647 of SEQ ID NO: 5151, or a pharmaceutically acceptable salt thereof.

93. The oligonucleotide of any one of claims 89-92, wherein the oligonucleotide, or a portion thereof, is complementary to 17-23 contiguous nucleobases at positions 2620-2647 of SEQ ID NO: 5151, or a pharmaceutically acceptable salt thereof.

94. The oligonucleotide of any one of claims 89-92, wherein the oligonucleotide, or a portion thereof, is complementary to 17-20 contiguous nucleobases at positions 2620-2647 of SEQ ID NO: 5151, or a pharmaceutically acceptable salt thereof.

95. The oligonucleotide of claim 94, wherein the oligonucleotide, or a portion thereof, is complementary to 17-20 contiguous nucleobases beginning at position 2620, 2621, 2622, 2623, 2624, 2625, 2626, 2627, 2628, 2629, 2630, or 2631 of SEQ ID NO: 5151, or a pharmaceutically acceptable salt thereof.

96. The oligonucleotide of any one of claims 89-95, wherein the oligonucleotide is 17-20 linked nucleotides in length, or a pharmaceutically acceptable salt thereof.

97. The oligonucleotide of any one of claims 89-92, wherein the oligonucleotide, or a portion thereof, is complementary to 20-23 contiguous nucleobases at positions 2620-2647 of SEQ ID NO: 5151, or a pharmaceutically acceptable salt thereof.

98. The oligonucleotide of claim 97, wherein the oligonucleotide, or a portion thereof, is complementary to 20-23 contiguous nucleobases beginning at position 2620, 2621, 2622, 2623, 2624, 2625, 2626, 2627, or 2627 of SEQ ID NO: 5151, or a pharmaceutically acceptable salt thereof.

99. The oligonucleotide of any one of claims 89-98, wherein the oligonucleotide is 20-23 linked nucleotides in length, or a pharmaceutically acceptable salt thereof.

100. A single-stranded oligonucleotide of 15-30 linked nucleotides in length, wherein the oligonucleotide, or a portion thereof, is at least 95% complementary to at least 15 contiguous nucleobases at positions 2685-2710 of SEQ ID NO: 5151, or a pharmaceutically acceptable salt thereof.

101. The oligonucleotide of claim 100, wherein the oligonucleotide, or a portion thereof, is at least 98% complementary to at least 15 contiguous nucleobases at positions 2685-2710 of SEQ ID NO: 5151, or a pharmaceutically acceptable salt thereof.

102. The oligonucleotide of claim 100, wherein the oligonucleotide, or a portion thereof, is at least 99% complementary to at least 15 contiguous nucleobases at positions 2685-2710 of SEQ ID NO: 5151, or a pharmaceutically acceptable salt thereof.

103. The oligonucleotide of claim 100, wherein the oligonucleotide, or a portion thereof, is 100% complementary to at least 15 contiguous nucleobases at positions 2685-2710 of SEQ ID NO: 5151, or a pharmaceutically acceptable salt thereof.

104. The oligonucleotide of any one of claims 100-103, wherein the oligonucleotide, or a portion thereof, is complementary to 17-23 contiguous nucleobases at positions 2685-2710 of SEQ ID NO: 5151, or a pharmaceutically acceptable salt thereof.

105. The oligonucleotide of any one of claims 100-103, wherein the oligonucleotide, or a portion thereof, is complementary to 17-20 contiguous nucleobases at positions 2685-2710 of SEQ ID NO: 5151, or a pharmaceutically acceptable salt thereof.

106. The oligonucleotide of claim 105, wherein the oligonucleotide, or a portion thereof, is complementary to 17-20 contiguous nucleobases beginning at position 2685, 2686, 2687, 2688, 2689, 2690, 2691, 2692, 2693, or 2694 of SEQ ID NO: 5151, or a pharmaceutically acceptable salt thereof.

107. The oligonucleotide of any one of claims 100-106, wherein the oligonucleotide is 17-20 linked nucleotides in length, or a pharmaceutically acceptable salt thereof.

108. The oligonucleotide of any one of claims 100-103, wherein the oligonucleotide is complementary to 20-23 contiguous nucleobases at positions 2685-2710 of SEQ ID NO: 5151, or a pharmaceutically acceptable salt thereof.

109. The oligonucleotide of 108, wherein the oligonucleotide is complementary to 20-23 contiguous nucleobases beginning at position 2685, 2686, 2687, 2688, 2689, 2690, or 2691 of SEQ ID NO: 5151, or a pharmaceutically acceptable salt thereof.

110. The oligonucleotide of any one of claims 100-109, wherein the oligonucleotide is 20-23 linked nucleotides in length, or a pharmaceutically acceptable salt thereof.

111. A single-stranded oligonucleotide of 15-30 linked nucleotides in length, wherein the oligonucleotide, or a portion thereof, is at least 95% complementary to at least 15 contiguous nucleobases at positions 2769-2795 of SEQ ID NO: 5151, or a pharmaceutically acceptable salt thereof.

112. The oligonucleotide of claim 111, wherein the oligonucleotide, or a portion thereof, is at least 98% complementary to at least 15 contiguous nucleobases at positions 2769-2795 of SEQ ID NO: 5151, or a pharmaceutically acceptable salt thereof.

113. The oligonucleotide of claim 111, wherein the oligonucleotide, or a portion thereof, is at least 99% complementary to at least 15 contiguous nucleobases at positions 2769-2795 of SEQ ID NO: 5151, or a pharmaceutically acceptable salt thereof.

114. The oligonucleotide of claim 111, wherein the oligonucleotide, or a portion thereof, is 100% complementary to at least 15 contiguous nucleobases at positions 2769-2795 of SEQ ID NO: 5151, or a pharmaceutically acceptable salt thereof.

115. The oligonucleotide of any one of claims 111-114, wherein the oligonucleotide, or a portion thereof, is complementary to 17-23 contiguous nucleobases at positions 2769-2795 of SEQ ID NO: 5151, or a pharmaceutically acceptable salt thereof.

116. The oligonucleotide of any one of claims 111-114, wherein the oligonucleotide, or a portion thereof, is complementary to 17-20 contiguous nucleobases at positions 2769-2795 of SEQ ID NO: 5151, or a pharmaceutically acceptable salt thereof.

117. The oligonucleotide of claim 116, wherein the oligonucleotide is complementary to 17-20 contiguous nucleobases beginning at position 2769, 2770, 2771, 2772, 2773, 2774, 2775, 2776, 2777, 2778, or 2779 of SEQ ID NO: 5151, or a pharmaceutically acceptable salt thereof.

118. The oligonucleotide of any one of claims 111-117, wherein the oligonucleotide is 17-20 linked nucleotides in length, or a pharmaceutically acceptable salt thereof.

119. The oligonucleotide of any one of claims 111-114, wherein the oligonucleotide, or a portion thereof, is complementary to 20-23 contiguous nucleobases at positions 2769-2795 of SEQ ID NO: 5151, or a pharmaceutically acceptable salt thereof.

120. The oligonucleotide of 119, wherein the oligonucleotide, or a portion thereof, is complementary to 20-23 contiguous nucleobases beginning at position 2769, 2770, 2771, 2772, 2773, 2774, 2775, or 2776 of SEQ ID NO: 5151, or a pharmaceutically acceptable salt thereof.

121. The oligonucleotide of any one of claims 111-120, wherein the oligonucleotide is 20-23 linked nucleotides in length, or a pharmaceutically acceptable salt thereof.

122. A single-stranded oligonucleotide of 15-30 linked nucleotides in length, wherein the oligonucleotide, or a portion thereof, is at least 95% complementary to at least 15 contiguous nucleobases at positions 2798-2868 of SEQ ID NO: 5151, or a pharmaceutically acceptable salt thereof.

123. The oligonucleotide of claim 122, wherein the oligonucleotide, or a portion thereof, is at least 98% complementary to at least 15 contiguous nucleobases at positions 2798-2868 of SEQ ID NO: 5151, or a pharmaceutically acceptable salt thereof.

124. The oligonucleotide of claim 122, wherein the oligonucleotide, or a portion thereof, is at least 99% complementary to at least 15 contiguous nucleobases at positions 2798-2868 of SEQ ID NO: 5151, or a pharmaceutically acceptable salt thereof.

125. The oligonucleotide of claim 122, wherein the oligonucleotide, or a portion thereof, is 100% complementary to at least 15 contiguous nucleobases at positions 2798-2868 of SEQ ID NO: 5151, or a pharmaceutically acceptable salt thereof.

126. The oligonucleotide of any one of claims 122-125, wherein the oligonucleotide, or a portion thereof, is complementary to 17-23 contiguous nucleobases at positions 2798-2868 of SEQ ID NO: 5151, or a pharmaceutically acceptable salt thereof.

127. The oligonucleotide of any one of claims 122-125, wherein the oligonucleotide, or a portion thereof, is complementary to 17-20 contiguous nucleobases at positions 2798-2868 of SEQ ID NO: 5151, or a pharmaceutically acceptable salt thereof.

128. The oligonucleotide of claim 127, wherein the oligonucleotide, or a portion thereof, is complementary to 17-20 contiguous nucleobases beginning at position 2798, 2799, 2800, 2801, 2802, 2803, 2804, 2805, 2806, 2807, 2808, 2809, 2810, 2811, 2812, 2813, 2814, 2815, 2816, 2817, 2818, 2819, 2820, 2821, 2822, 2823, 2824, 2825, 2826, 2827, 2828, 2829, 2830, 2831, 2832, 2833, 2834, 2835, 2836, 2837, 2838, 2839, 2840, 2841, 2842, 2843, 2844, 2845, 2846, 2847, 2848, 2849, 2850, 2851, or 2852 of SEQ ID NO: 5151, or a pharmaceutically acceptable salt thereof.

129. The oligonucleotide of any one of claims 122-128, wherein the oligonucleotide is 17-20 linked nucleotides in length, or a pharmaceutically acceptable salt thereof.

130. The oligonucleotide of any one of claims 122-125, wherein the oligonucleotide, or a portion thereof, is complementary to 20-23 contiguous nucleobases at positions 2798-2868 of SEQ ID NO: 5151, or a pharmaceutically acceptable salt thereof.

131. The oligonucleotide of 130, wherein the oligonucleotide, or a portion thereof, is complementary to 20-23 contiguous nucleobases beginning at position 2798, 2799, 2800, 2801, 2802, 2803, 2804, 2805, 2806, 2807, 2808, 2809, 2810, 2811, 2812, 2813, 2814, 2815, 2816, 2817, 2818, 2819, 2820, 2821, 2822, 2823, 2824, 2825, 2826, 2827, 2828, 2829, 2830, 2831, 2832, 2833, 2834, 2835, 2836, 2837, 2838, 2839, 2840, 2841, 2842, 2843, 2844, 2845, 2846, 2847, 2848, or 2849 of SEQ ID NO: 5151, or a pharmaceutically acceptable salt thereof.

132. The oligonucleotide of any one of claims 122-131, wherein the oligonucleotide is 20-23 linked nucleotides in length, or a pharmaceutically acceptable salt thereof.

133. A single-stranded oligonucleotide of 15-30 linked nucleotides in length, wherein the oligonucleotide, or a portion thereof, is at least 95% complementary to at least 15 contiguous nucleobases at positions 2950-2975 of SEQ ID NO: 5151, or a pharmaceutically acceptable salt thereof.

134. The oligonucleotide of claim 133, wherein the oligonucleotide, or a portion thereof, is at least 98% complementary to at least 15 contiguous nucleobases at positions 2950-2975 of SEQ ID NO: 5151, or a pharmaceutically acceptable salt thereof.

135. The oligonucleotide of claim 133, wherein the oligonucleotide, or a portion thereof, is at least 99% complementary to at least 15 contiguous nucleobases at positions 2950-2975 of SEQ ID NO: 5151, or a pharmaceutically acceptable salt thereof.

136. The oligonucleotide of claim 133, wherein the oligonucleotide, or a portion thereof, is 100% complementary to at least 15 contiguous nucleobases at positions 2950-2975 of SEQ ID NO: 5151, or a pharmaceutically acceptable salt thereof.

137. The oligonucleotide of any one of claims 133-136, wherein the oligonucleotide, or a portion thereof, is complementary to 17-23 contiguous nucleobases at positions 2950-2975 of SEQ ID NO: 5151, or a pharmaceutically acceptable salt thereof.

138. The oligonucleotide of any one of claims 133-136, wherein the oligonucleotide, or a portion thereof, is complementary to 17-20 contiguous nucleobases at positions 2950-2975 of SEQ ID NO: 5151, or a pharmaceutically acceptable salt thereof.

139. The oligonucleotide of claim 139, wherein the oligonucleotide, or a portion thereof, is complementary to 17-20 contiguous nucleobases beginning at position 2950, 2951, 2952, 2953, 2954, 2955, 2956, 2957, 2958, or 2959 of SEQ ID NO: 5151, or a pharmaceutically acceptable salt thereof.

140. The oligonucleotide of any one of claims 133-139, wherein the oligonucleotide is 17-20 linked nucleotides in length, or a pharmaceutically acceptable salt thereof.

141. The oligonucleotide of any one of claims 133-136, wherein the oligonucleotide, or a portion thereof, is complementary to 20-23 contiguous nucleobases at positions 2950-2975 of SEQ ID NO: 5151, or a pharmaceutically acceptable salt thereof.

142. The oligonucleotide of 141, wherein the oligonucleotide, or a portion thereof, is complementary to 20-23 contiguous nucleobases beginning at position 2950, 2951, 2952, 2953, 2954, 2955, or 2956 of SEQ ID NO: 5151, or a pharmaceutically acceptable salt thereof.

143. The oligonucleotide of any one of claims 133-142, wherein the oligonucleotide is 20-23 linked nucleotides in length, or a pharmaceutically acceptable salt thereof.

144. The oligonucleotide of any one of claims 1-143, wherein the oligonucleotide is not any one of Antisense Oligo Nos. 5152-5176 of Table 3.

145. The oligonucleotide of any one of claims 1-144, wherein the oligonucleotide does not have a nucleobase sequence consisting of any one of SEQ ID NOs 5152-5176.

146. The oligonucleotide of any one of claims 1-145, wherein the oligonucleotide comprises:
(a) a DNA core sequence comprising linked deoxyribonucleosides;
(b) a 5′ flanking sequence comprising linked nucleosides; and
(c) a 3′ flanking sequence comprising linked nucleosides;
wherein the DNA core comprises a region of at least 10 contiguous nucleobases positioned between the 5′ flanking sequence and the 3′ flanking sequence; wherein the 5′ flanking sequence and the 3′ flanking sequence each comprises at least two linked nucleosides; and wherein at least one nucleoside of each flanking sequence comprises an alternative nucleoside, or a pharmaceutically acceptable salt thereof.

147. The oligonucleotide of any one of claims 1-146, wherein the oligonucleotide comprises at least one alternative internucleoside linkage, or a pharmaceutically acceptable salt thereof.

148. The oligonucleotide of claim 147, wherein the at least one alternative internucleoside linkage is a phosphorothioate internucleoside linkage.

149. The oligonucleotide of claim 147, wherein the at least one alternative internucleoside linkage is a 2′-alkoxy internucleoside linkage.

150. The oligonucleotide of claim 147, wherein the at least one alternative internucleoside linkage is an alkyl phosphate internucleoside linkage.

151. The oligonucleotide of any one of claims 1-150, wherein the oligonucleotide comprises at least one alternative nucleobase, or a pharmaceutically acceptable salt thereof.

152. The oligonucleotide of claim 151, wherein the alternative nucleobase is 5′-methylcytosine, pseudouridine, or 5-methoxyuridine.

153. The oligonucleotide of any one of claims 1-152, wherein the oligonucleotide comprises at least one alternative sugar moiety, or a pharmaceutically acceptable salt thereof.

154. The oligonucleotide of claim 153, wherein the alternative sugar moiety is 2′-OMe or a bicyclic nucleic acid.

155. The oligonucleotide of any one of claims 1-154, wherein the oligonucleotidefurther comprises a ligand conjugated to the 5′ end or the 3′ end of the oligonucleotide through a monovalent or branched bivalent or trivalent linker, or a pharmaceutically acceptable salt thereof.

156. The oligonucleotide of any one of claims 1-155, wherein the oligonucleotide consists of a nucleobase sequence selected from the group consisting of any of SEQ ID NOs: 1-5150 and 5152-5176, or a pharmaceutically acceptable salt thereof.

157. The oligonucleotide of claim 156, wherein the oligonucleotide consists of a nucleobase sequence selected from the group consisting of any of SEQ ID NOs: 1-5150, or a pharmaceutically acceptable salt thereof.

158. The oligonucleotide of claim 156, wherein the oligonucleotide consists of a nucleobase sequence selected from the group consisting of any of SEQ ID NOs: 1-206 and 5152, or a pharmaceutically acceptable salt thereof.

159. The oligonucleotide of claim 156, wherein the oligonucleotide consists of a nucleobase sequence selected from the group consisting of any of SEQ ID NOs: 1-206, or a pharmaceutically acceptable salt thereof.

160. The oligonucleotide of claim 156, wherein the oligonucleotide consists of a nucleobase sequence selected from the group consisting of any of SEQ ID NOs: 207-412 and 5153, or a pharmaceutically acceptable salt thereof.

161. The oligonucleotide of claim 156, wherein the oligonucleotide consists of a nucleobase sequence selected from the group consisting of any of SEQ ID NOs: 207-412, or a pharmaceutically acceptable salt thereof.

162. The oligonucleotide of claim 156, wherein the oligonucleotide consists of a nucleobase sequence selected from the group consisting of any of SEQ ID NOs: 413-618 and 5154, or a pharmaceutically acceptable salt thereof.

163. The oligonucleotide of claim 156, wherein the oligonucleotide consists of a nucleobase sequence selected from the group consisting of any of SEQ ID NOs: 413-618, or a pharmaceutically acceptable salt thereof.

164. The oligonucleotide of claim 156, wherein the oligonucleotide consists of a nucleobase sequence selected from the group consisting of any of SEQ ID NOs: 619-824 and 5155, or a pharmaceutically acceptable salt thereof.

165. The oligonucleotide of claim 156, wherein the oligonucleotide consists of a nucleobase sequence selected from the group consisting of any of SEQ ID NOs: 619-824, or a pharmaceutically acceptable salt thereof.

166. The oligonucleotide of claim 156, wherein the oligonucleotide consists of a nucleobase sequence selected from the group consisting of any of SEQ ID NOs: 825-1030 and 5156, or a pharmaceutically acceptable salt thereof.

167. The oligonucleotide of claim 156, wherein the oligonucleotide consists of a nucleobase sequence selected from the group consisting of any of SEQ ID NOs: 825-1030, or a pharmaceutically acceptable salt thereof.

168. The oligonucleotide of claim 156, wherein the oligonucleotide consists of a nucleobase sequence selected from the group consisting of any of SEQ ID NOs: 1031-1236 and 5157, or a pharmaceutically acceptable salt thereof.

169. The oligonucleotide of claim 156, wherein the oligonucleotide consists of a nucleobase sequence selected from the group consisting of any of SEQ ID NOs: 1031-1236, or a pharmaceutically acceptable salt thereof.

170. The oligonucleotide of claim 156, wherein the oligonucleotide consists of a nucleobase sequence selected from the group consisting of any of SEQ ID NOs: 1237-1442 and 5158, or a pharmaceutically acceptable salt thereof.

171. The oligonucleotide of claim 156, wherein the oligonucleotide consists of a nucleobase sequence selected from the group consisting of any of SEQ ID NOs: 1237-1442, or a pharmaceutically acceptable salt thereof.

172. The oligonucleotide of claim 156, wherein the oligonucleotide consists of a nucleobase sequence selected from the group consisting of any of SEQ ID NOs: 1443-1648 and 5159, or a pharmaceutically acceptable salt thereof.

173. The oligonucleotide of claim 156, wherein the oligonucleotide consists of a nucleobase sequence selected from the group consisting of any of SEQ ID NOs: 1443-1648, or a pharmaceutically acceptable salt thereof.

174. The oligonucleotide of claim 156, wherein the oligonucleotide consists of a nucleobase sequence selected from the group consisting of any of SEQ ID NOs: 1649-1854 and 5160, or a pharmaceutically acceptable salt thereof.

175. The oligonucleotide of claim 156, wherein the oligonucleotide consists of a nucleobase sequence selected from the group consisting of any of SEQ ID NOs: 1649-1854, or a pharmaceutically acceptable salt thereof.

176. The oligonucleotide of claim 156, wherein the oligonucleotide consists of a nucleobase sequence selected from the group consisting of any of SEQ ID NOs: 1855-2060 and 5161, or a pharmaceutically acceptable salt thereof.

177. The oligonucleotide of claim 156, wherein the oligonucleotide consists of a nucleobase sequence selected from the group consisting of any of SEQ ID NOs: 1855-2060, or a pharmaceutically acceptable salt thereof.

178. The oligonucleotide of claim 156, wherein the oligonucleotide consists of a nucleobase sequence selected from the group consisting of any of SEQ ID NOs: 2061-2266 and 5162, or a pharmaceutically acceptable salt thereof.

179. The oligonucleotide of claim 156, wherein the oligonucleotide consists of a nucleobase sequence selected from the group consisting of any of SEQ ID NOs: 2061-2266, or a pharmaceutically acceptable salt thereof.

180. The oligonucleotide of claim 156, wherein the oligonucleotide consists of a nucleobase sequence selected from the group consisting of any of SEQ ID NOs: 2267-2472 and 5163, or a pharmaceutically acceptable salt thereof.

181. The oligonucleotide of claim 156, wherein the oligonucleotide consists of a nucleobase sequence selected from the group consisting of any of SEQ ID NOs: 2267-2472, or a pharmaceutically acceptable salt thereof.

182. The oligonucleotide of claim 156, wherein the oligonucleotide consists of a nucleobase sequence selected from the group consisting of any of SEQ ID NOs: 2473-2678 and 5164, or a pharmaceutically acceptable salt thereof.

183. The oligonucleotide of claim 156, wherein the oligonucleotide consists of a nucleobase sequence selected from the group consisting of any of SEQ ID NOs: 2473-2678, or a pharmaceutically acceptable salt thereof.

184. The oligonucleotide of claim 156, wherein the oligonucleotide consists of a nucleobase sequence selected from the group consisting of any of SEQ ID NOs: 2679-2884 and 5165, or a pharmaceutically acceptable salt thereof.

185. The oligonucleotide of claim 156, wherein the oligonucleotide consists of a nucleobase sequence selected from the group consisting of any of SEQ ID NOs: 2679-2884, or a pharmaceutically acceptable salt thereof.

186. The oligonucleotide of claim 156, wherein the oligonucleotide consists of a nucleobase sequence selected from the group consisting of any of SEQ ID NOs: 2885-3090 and 5166, or a pharmaceutically acceptable salt thereof.

187. The oligonucleotide of claim 156, wherein the oligonucleotide consists of a nucleobase sequence selected from the group consisting of any of SEQ ID NOs: 2885-3090, or a pharmaceutically acceptable salt thereof.

188. The oligonucleotide of claim 156, wherein the oligonucleotide consists of a nucleobase sequence selected from the group consisting of any of SEQ ID NOs: 3091-3296 and 5167, or a pharmaceutically acceptable salt thereof.

189. The oligonucleotide of claim 156, wherein the oligonucleotide consists of a nucleobase sequence selected from the group consisting of any of SEQ ID NOs: 3091-3296, or a pharmaceutically acceptable salt thereof.

190. The oligonucleotide of claim 156, wherein the oligonucleotide consists of a nucleobase sequence selected from the group consisting of any of SEQ ID NOs: 3297-3502 and 5168, or a pharmaceutically acceptable salt thereof.

191. The oligonucleotide of claim 156, wherein the oligonucleotide consists of a nucleobase sequence selected from the group consisting of any of SEQ ID NOs: 3297-3502, or a pharmaceutically acceptable salt thereof.

192. The oligonucleotide of claim 156, wherein the oligonucleotide consists of a nucleobase sequence selected from the group consisting of any of SEQ ID NOs: 3503-3708 and 5169, or a pharmaceutically acceptable salt thereof.

193. The oligonucleotide of claim 156, wherein the oligonucleotide consists of a nucleobase sequence selected from the group consisting of any of SEQ ID NOs: 3503-3708, or a pharmaceutically acceptable salt thereof.

194. The oligonucleotide of claim 156, wherein the oligonucleotide consists of a nucleobase sequence selected from the group consisting of any of SEQ ID NOs: 3709-3914 and 5170, or a pharmaceutically acceptable salt thereof.

195. The oligonucleotide of claim 156, wherein the oligonucleotide consists of a nucleobase sequence selected from the group consisting of any of SEQ ID NOs: 3709-3914, or a pharmaceutically acceptable salt thereof.

196. The oligonucleotide of claim 156, wherein the oligonucleotide consists of a nucleobase sequence selected from the group consisting of any of SEQ ID NOs: 3915-4120 and 5171, or a pharmaceutically acceptable salt thereof.

197. The oligonucleotide of claim 156, wherein the oligonucleotide consists of a nucleobase sequence selected from the group consisting of any of SEQ ID NOs: 3915-4120, or a pharmaceutically acceptable salt thereof.

198. The oligonucleotide of claim 156, wherein the oligonucleotide consists of a nucleobase sequence selected from the group consisting of any of SEQ ID NOs: 4121-4326 and 5172, or a pharmaceutically acceptable salt thereof.

199. The oligonucleotide of claim 156, wherein the oligonucleotide consists of a nucleobase sequence selected from the group consisting of any of SEQ ID NOs: 4121-4326, or a pharmaceutically acceptable salt thereof.

200. The oligonucleotide of claim 156, wherein the oligonucleotide consists of a nucleobase sequence selected from the group consisting of any of SEQ ID NOs: 4327-4532 and 5173, or a pharmaceutically acceptable salt thereof.

201. The oligonucleotide of claim 156, wherein the oligonucleotide consists of a nucleobase sequence selected from the group consisting of any of SEQ ID NOs: 4327-4532, or a pharmaceutically acceptable salt thereof.

202. The oligonucleotide of claim 156, wherein the oligonucleotide consists of a nucleobase sequence selected from the group consisting of any of SEQ ID NOs: 4533-4738 and 5174, or a pharmaceutically acceptable salt thereof.

203. The oligonucleotide of claim 156, wherein the oligonucleotide consists of a nucleobase sequence selected from the group consisting of any of SEQ ID NOs: 4533-4738, or a pharmaceutically acceptable salt thereof.

204. The oligonucleotide of claim 156, wherein the oligonucleotide consists of a nucleobase sequence selected from the group consisting of any of SEQ ID NOs: 4739-4944 and 5175, or a pharmaceutically acceptable salt thereof.

205. The oligonucleotide of claim 156, wherein the oligonucleotide consists of a nucleobase sequence selected from the group consisting of any of SEQ ID NOs: 4739-4944, or a pharmaceutically acceptable salt thereof.

206. The oligonucleotide of claim 156, wherein the oligonucleotide consists of a nucleobase sequence selected from the group consisting of any of SEQ ID NOs: 4945-5150 and 5176, or a pharmaceutically acceptable salt thereof.

207. The oligonucleotide of claim 156, wherein the oligonucleotide consists of a nucleobase sequence selected from the group consisting of any of SEQ ID NOs: 4945-5150, or a pharmaceutically acceptable salt thereof.

208. A single-stranded oligonucleotide, wherein the nucleobase sequence of the oligonucleotide consists of any one of SEQ ID NOs: 1-5150 and 5152-5176, or a pharmaceutically acceptable salt thereof.

209. The oligonucleotide of claim 208, wherein the nucleobase sequence of the oligonucleotide consists of any one of SEQ ID NOs: 1-5150, or a pharmaceutically acceptable salt thereof.

210. The oligonucleotide of claim 208, wherein the nucleobase sequence of the oligonucleotide consists of any one of SEQ ID NOs: 1-206 and 5152, or a pharmaceutically acceptable salt thereof.

211. The oligonucleotide of claim 208, wherein the nucleobase sequence of the oligonucleotide consists of any one of SEQ ID NOs: 1-206, or a pharmaceutically acceptable salt thereof.

212. The oligonucleotide of claim 208, wherein the oligonucleotide consists of the nucleobase sequence of any one of SEQ ID NOs: 207-412 and 5153, or a pharmaceutically acceptable salt thereof.

213. The oligonucleotide of claim 208, wherein the oligonucleotide consists of the nucleobase sequence of any one of SEQ ID NOs: 207-412, or a pharmaceutically acceptable salt thereof.

214. The oligonucleotide of claim 208, wherein the oligonucleotide consists of the nucleobase sequence of any one of SEQ ID NOs: 413-618 and 5154, or a pharmaceutically acceptable salt thereof.

215. The oligonucleotide of claim 208, wherein the oligonucleotide consists of the nucleobase sequence of any one of SEQ ID NOs: 413-618, or a pharmaceutically acceptable salt thereof.

216. The oligonucleotide of claim 208, wherein the oligonucleotide consists of the nucleobase sequence of any one of SEQ ID NOs: 619-824 and 5155, or a pharmaceutically acceptable salt thereof.

217. The oligonucleotide of claim 208, wherein the oligonucleotide consists of the nucleobase sequence of any one of SEQ ID NOs: 619-824, or a pharmaceutically acceptable salt thereof.

218. The oligonucleotide of claim 208, wherein the oligonucleotide consists of the nucleobase sequence of any one of SEQ ID NOs: 825-1030 and 5156, or a pharmaceutically acceptable salt thereof.

219. The oligonucleotide of claim 208, wherein the oligonucleotide consists of the nucleobase sequence of any one of SEQ ID NOs: 825-1030 or a pharmaceutically acceptable salt thereof.

220. The oligonucleotide of claim 208, wherein the oligonucleotide consists of the nucleobase sequence of any one of SEQ ID NOs: 1031-1236 and 5157, or a pharmaceutically acceptable salt thereof.

221. The oligonucleotide of claim 208, wherein the oligonucleotide consists of the nucleobase sequence of any one of SEQ ID NOs: 1031-1236, or a pharmaceutically acceptable salt thereof.

222. The oligonucleotide of claim 208, wherein the oligonucleotide consists of the nucleobase sequence of any one of SEQ ID NOs: 1237-1442 and 5158, or a pharmaceutically acceptable salt thereof.

223. The oligonucleotide of claim 208, wherein the oligonucleotide consists of the nucleobase sequence of any one of SEQ ID NOs: 1237-1442, or a pharmaceutically acceptable salt thereof.

224. The oligonucleotide of claim 208, wherein the oligonucleotide consists of the nucleobase sequence of any one of SEQ ID NOs: 1443-1648 and 5159, or a pharmaceutically acceptable salt thereof.

225. The oligonucleotide of claim 208, wherein the oligonucleotide consists of the nucleobase sequence of any one of SEQ ID NOs: 1443-1648, or a pharmaceutically acceptable salt thereof.

226. The oligonucleotide of claim 208, wherein the oligonucleotide consists of the nucleobase sequence of any one of SEQ ID NOs: 1649-1854 and 5160 or a pharmaceutically acceptable salt thereof.

227. The oligonucleotide of claim 208, wherein the oligonucleotide consists of the nucleobase sequence of any one of SEQ ID NOs: 1649-1854, or a pharmaceutically acceptable salt thereof.

228. The oligonucleotide of claim 208, wherein the oligonucleotide consists of the nucleobase sequence of any one of SEQ ID NOs: 1855-2060 and 5161, or a pharmaceutically acceptable salt thereof.

229. The oligonucleotide of claim 208, wherein the oligonucleotide consists of the nucleobase sequence of any one of SEQ ID NOs: 1855-2060, or a pharmaceutically acceptable salt thereof.

230. The oligonucleotide of claim 208, wherein the oligonucleotide consists of the nucleobase sequence of any one of SEQ ID NOs: 2061-2266 and 5162, or a pharmaceutically acceptable salt thereof.

231. The oligonucleotide of claim 208, wherein the oligonucleotide consists of the nucleobase sequence of any one of SEQ ID NOs: 2061-2266, or a pharmaceutically acceptable salt thereof.

232. The oligonucleotide of claim 208, wherein the oligonucleotide consists of the nucleobase sequence of any one of SEQ ID NOs: 2267-2472 and 5163, or a pharmaceutically acceptable salt thereof.

233. The oligonucleotide of claim 208, wherein the oligonucleotide consists of the nucleobase sequence of any one of SEQ ID NOs: 2267-2472, or a pharmaceutically acceptable salt thereof.

234. The oligonucleotide of claim 208, wherein the oligonucleotide consists of the nucleobase sequence of any one of SEQ ID NOs: 2473-2678 and 5164, or a pharmaceutically acceptable salt thereof.

235. The oligonucleotide of claim 208, wherein the oligonucleotide consists of the nucleobase sequence of any one of SEQ ID NOs: 2473-2678, or a pharmaceutically acceptable salt thereof.

236. The oligonucleotide of claim 208, wherein the oligonucleotide consists of the nucleobase sequence of any one of SEQ ID NOs: 2679-2884 and 5165, or a pharmaceutically acceptable salt thereof.

237. The oligonucleotide of claim 208, wherein the oligonucleotide consists of the nucleobase sequence of any one of SEQ ID NOs: 2679-2884, or a pharmaceutically acceptable salt thereof.

238. The oligonucleotide of claim 208, wherein the oligonucleotide consists of the nucleobase sequence of any one of SEQ ID NOs: 2885-3090 and 5166, or a pharmaceutically acceptable salt thereof.

239. The oligonucleotide of claim 208, wherein the oligonucleotide consists of the nucleobase sequence of any one of SEQ ID NOs: 2885-3090, or a pharmaceutically acceptable salt thereof.

240. The oligonucleotide of claim 208, wherein the oligonucleotide consists of the nucleobase sequence of any one of SEQ ID NOs: 3091-3296 and 5167, or a pharmaceutically acceptable salt thereof.

241. The oligonucleotide of claim 208, wherein the oligonucleotide consists of the nucleobase sequence of any one of SEQ ID NOs: 3091-3296, or a pharmaceutically acceptable salt thereof.

242. The oligonucleotide of claim 208, wherein the oligonucleotide consists of the nucleobase sequence of any one of SEQ ID NOs: 3297-3502 and 5168, or a pharmaceutically acceptable salt thereof.

243. The oligonucleotide of claim 208, wherein the oligonucleotide consists of the nucleobase sequence of any one of SEQ ID NOs: 3297-3502, or a pharmaceutically acceptable salt thereof.

244. The oligonucleotide of claim 208, wherein the oligonucleotide consists of the nucleobase sequence of any one of SEQ ID NOs: 3503-3708 and 5169, or a pharmaceutically acceptable salt thereof.

245. The oligonucleotide of claim 208, wherein the oligonucleotide consists of the nucleobase sequence of any one of SEQ ID NOs: 3503-3708, or a pharmaceutically acceptable salt thereof.

246. The oligonucleotide of claim 208, wherein the oligonucleotide consists of the nucleobase sequence of any one of SEQ ID NOs: 3709-3914 and 5170, or a pharmaceutically acceptable salt thereof.

247. The oligonucleotide of claim 208, wherein the oligonucleotide consists of the nucleobase sequence of any one of SEQ ID NOs: 3709-3914, or a pharmaceutically acceptable salt thereof.

248. The oligonucleotide of claim 208, wherein the oligonucleotide consists of the nucleobase sequence of any one of SEQ ID NOs: 3915-4120 and 5171, or a pharmaceutically acceptable salt thereof.

249. The oligonucleotide of claim 208, wherein the oligonucleotide consists of the nucleobase sequence of any one of SEQ ID NOs: 3915-4120, or a pharmaceutically acceptable salt thereof.

250. The oligonucleotide of claim 208, wherein the oligonucleotide consists of the nucleobase sequence of any one of SEQ ID NOs: 4121-4326 and 5172, or a pharmaceutically acceptable salt thereof.

251. The oligonucleotide of claim 208, wherein the oligonucleotide consists of the nucleobase sequence of any one of SEQ ID NOs: 4121-4326, or a pharmaceutically acceptable salt thereof.

252. The oligonucleotide of claim 208, wherein the oligonucleotide consists of the nucleobase sequence of any one of SEQ ID NOs: 4327-4532 and 5173, or a pharmaceutically acceptable salt thereof.

253. The oligonucleotide of claim 208, wherein the oligonucleotide consists of the nucleobase sequence of any one of SEQ ID NOs: 4327-4532, or a pharmaceutically acceptable salt thereof.

254. The oligonucleotide of claim 208, wherein the oligonucleotide consists of the nucleobase sequence of any one of SEQ ID NOs: 4533-4738 and 5174, or a pharmaceutically acceptable salt thereof.

255. The oligonucleotide of claim 208, wherein the oligonucleotide consists of the nucleobase sequence of any one of SEQ ID NOs: 4533-4738, or a pharmaceutically acceptable salt thereof.

256. The oligonucleotide of claim 208, wherein the oligonucleotide consists of the nucleobase sequence of any one of SEQ ID NOs: 4739-4944 and 5175, or a pharmaceutically acceptable salt thereof.

257. The oligonucleotide of claim 208, wherein the oligonucleotide consists of the nucleobase sequence of any one of SEQ ID NOs: 4739-4944, or a pharmaceutically acceptable salt thereof.

258. The oligonucleotide of claim 208, wherein the oligonucleotide consists of the nucleobase sequence of any one of SEQ ID NOs: 4945-5150 and 5176, or a pharmaceutically acceptable salt thereof.

259. The oligonucleotide of claim 208, wherein the oligonucleotide consists of the nucleobase sequence of any one of SEQ ID NOs: 4945-5150, or a pharmaceutically acceptable salt thereof.

260. The oligonucleotide of claim 208, wherein the oligonucleotide consists of the nucleobase sequence selected from the group consisting of any one of SEQ ID NOs: 5152-5176, or a pharmaceutically acceptable salt thereof.

261. An oligonucleotide selected from the group consisting of Antisense Oligo Nos. 1-5150 and 5152-5176 of Table 3, or a pharmaceutically acceptable salt thereof.

262. The oligonucleotide of claim 261, wherein the oligonucleotide is selected from the group consisting of Antisense Oligo Nos. 1-5150 of Table 3, or a pharmaceutically acceptable salt thereof.

263. The oligonucleotide of claim 261, wherein the oligonucleotide is selected from the group consisting of Antisense Oligo Nos. 1-206 and 5152 of Table 3, or a pharmaceutically acceptable salt thereof.

264. The oligonucleotide of claim 261, wherein the oligonucleotide is selected from the group consisting of Antisense Oligo Nos. 1-206 of Table 3, or a pharmaceutically acceptable salt thereof.

265. The oligonucleotide claim 261, wherein the oligonucleotide is selected from the group consisting of Antisense Oligo Nos. 207-412 and 5153 of Table 3, or a pharmaceutically acceptable salt thereof.

266. The oligonucleotide claim 261, wherein the oligonucleotide is selected from the group consisting of Antisense Oligo Nos. 207-412 of Table 3, or a pharmaceutically acceptable salt thereof.

267. The oligonucleotide claim 261, wherein the oligonucleotide is selected from the group consisting of Antisense Oligo Nos. 413-618 and 5154 of Table 3, or a pharmaceutically acceptable salt thereof.

268. The oligonucleotide claim 261, wherein the oligonucleotide is selected from the group consisting of Antisense Oligo Nos. 413-618 of Table 3, or a pharmaceutically acceptable salt thereof.

269. The oligonucleotide claim 261, wherein the oligonucleotide is selected from the group consisting of Antisense Oligo Nos. 619-824 and 5155 of Table 3, or a pharmaceutically acceptable salt thereof.

270. The oligonucleotide claim 261, wherein the oligonucleotide is selected from the group consisting of Antisense Oligo Nos. 619-824 of Table 3, or a pharmaceutically acceptable salt thereof.

271. The oligonucleotide claim 261, wherein the oligonucleotide is selected from the group consisting of Antisense Oligo Nos. 825-1030 and 5156 of Table 3, or a pharmaceutically acceptable salt thereof.

272. The oligonucleotide claim 261, wherein the oligonucleotide is selected from the group consisting of Antisense Oligo Nos. 825-1030 of Table 3, or a pharmaceutically acceptable salt thereof.

273. The oligonucleotide of claim 261, wherein the oligonucleotide is selected from the group consisting of Antisense Oligo Nos. 1031-1236 and 5157 of Table 3, or a pharmaceutically acceptable salt thereof.

274. The oligonucleotide of claim 261, wherein the oligonucleotide is selected from the group consisting of Antisense Oligo Nos. 1031-1236 of Table 3, or a pharmaceutically acceptable salt thereof.

275. The oligonucleotide of claim 261, wherein the oligonucleotide is selected from the group consisting of Antisense Oligo Nos. 1237-1442 and 5158 of Table 3, or a pharmaceutically acceptable salt thereof.

276. The oligonucleotide of claim 261, wherein the oligonucleotide is selected from the group consisting of Antisense Oligos Nos. 1237-1442 of Table 3, or a pharmaceutically acceptable salt thereof.

277. The oligonucleotide of claim 261, wherein the oligonucleotide is selected from the group consisting of Antisense Oligos Nos. 1443-1648 and 5159 of Table 3, or a pharmaceutically acceptable salt thereof.

278. The oligonucleotide of claim 261, wherein the oligonucleotide is selected from the group consisting of Antisense Oligo Nos. 1443-1648 of Table 3, or a pharmaceutically acceptable salt thereof.

279. The oligonucleotide of claim 261, wherein the oligonucleotide is selected from the group consisting of Antisense Oligo Nos. 1649-1854 and 5160 of Table 3, or a pharmaceutically acceptable salt thereof.

280. The oligonucleotide of claim 261, wherein the oligonucleotide is selected from the group consisting of Antisense Oligo Nos. 1649-1854 of Table 3, or a pharmaceutically acceptable salt thereof.

281. The oligonucleotide of claim 261, wherein the oligonucleotide is selected from the group consisting of Antisense Oligo Nos. 1855-2060 and 5161 of Table 3, or a pharmaceutically acceptable salt thereof.

282. The oligonucleotide of claim 261, wherein the oligonucleotide is selected from the group consisting of Antisense Oligo Nos. 1855-2060 of Table 3 or a pharmaceutically acceptable salt thereof.

283. The oligonucleotide of claim 261, wherein the oligonucleotide is selected from the group consisting of Antisense Oligo Nos. 2061-2266 and 5162 of Table 3, or a pharmaceutically acceptable salt thereof.

284. The oligonucleotide of claim 261, wherein the oligonucleotide is selected from the group consisting of Antisense Oligo Nos. 2061-2266 of Table 3, or a pharmaceutically acceptable salt thereof.

285. The oligonucleotide of claim 261, wherein the oligonucleotide is selected from the group consisting of Antisense Oligo Nos. 2267-2472 and 5163 of Table 3, or a pharmaceutically acceptable salt thereof.

286. The oligonucleotide of claim 261, wherein the oligonucleotide is selected from the group consisting of Antisense Oligo Nos. 2267-2472 of Table 3, or a pharmaceutically acceptable salt thereof.

287. The oligonucleotide of claim 261, wherein the oligonucleotide is selected from the group consisting of Antisense Oligo Nos. 2473-2678 and 5164 of Table 3, or a pharmaceutically acceptable salt thereof.

288. The oligonucleotide of claim 261, wherein the oligonucleotide is Antisense Oligo No. 2473-2678 of Table 3, or a pharmaceutically acceptable salt thereof.

289. The oligonucleotide of claim 261, wherein the oligonucleotide is selected from the group consisting of Antisense Oligo Nos. 2679-2884 and 5165 of Table 3, or a pharmaceutically acceptable salt thereof.

290. The oligonucleotide of claim 261, wherein the oligonucleotide is selected from the group consisting of Antisense Oligo Nos. 2679-2884 of Table 3, or a pharmaceutically acceptable salt thereof.

291. The oligonucleotide of claim 261, wherein the oligonucleotide is selected from the group consisting of Antisense Oligo Nos. 2885-3090 and 5166 of Table 3, or a pharmaceutically acceptable salt thereof.

292. The oligonucleotide of claim 261, wherein the oligonucleotide is selected from the group consisting of Antisense Oligo Nos. 2885-3090 of Table 3, or a pharmaceutically acceptable salt thereof.

293. The oligonucleotide of claim 261, wherein the oligonucleotide is selected from the group consisting of Antisense Oligo Nos. 3091-3296 and 5167 of Table 3, or a pharmaceutically acceptable salt thereof.

294. The oligonucleotide of claim 261, wherein the oligonucleotide is selected from the group consisting of Antisense Oligo Nos. 3091-3296 of Table 3, or a pharmaceutically acceptable salt thereof.

295. The oligonucleotide of claim 261, wherein the oligonucleotide is selected from the group consisting of Antisense Oligo Nos. 3297-3502 and 5168 of Table 3, or a pharmaceutically acceptable salt thereof.

296. The oligonucleotide of claim 261, wherein the oligonucleotide is selected from the group consisting of Antisense Oligo Nos. 3297-3502 of Table 3, or a pharmaceutically acceptable salt thereof.

297. The oligonucleotide of claim 261, wherein the oligonucleotide is selected from the group consisting of Antisense Oligo Nos. 3503-3708 and 5169 of Table 3, or a pharmaceutically acceptable salt thereof.

298. The oligonucleotide of claim 261, wherein the oligonucleotide is selected from the group consisting of Antisense Oligo Nos. 3503-3708 of Table 3, or a pharmaceutically acceptable salt thereof.

299. The oligonucleotide of claim 261, wherein the oligonucleotide is selected from the group consisting of Antisense Oligo Nos. 3709-3914 and 5170 of Table 3, or a pharmaceutically acceptable salt thereof.

300. The oligonucleotide of claim 261, wherein the oligonucleotide is selected from the group consisting of Antisense Oligo Nos. 3709-3914 of Table 3, or a pharmaceutically acceptable salt thereof.

301. The oligonucleotide of claim 261, wherein the oligonucleotide is selected from the group consisting of Antisense Oligo Nos. 3915-4120 and 5171 of Table 3, or a pharmaceutically acceptable salt thereof.

302. The oligonucleotide of claim 261, wherein the oligonucleotide is selected from the group consisting of Antisense Oligo Nos. 3915-4120 of Table 3, or a pharmaceutically acceptable salt thereof.

303. The oligonucleotide of claim 261, wherein the oligonucleotide is selected from the group consisting of Antisense Oligo Nos. 4121-4326 and 5172 of Table 3, or a pharmaceutically acceptable salt thereof.

304. The oligonucleotide of claim 261, wherein the oligonucleotide is selected from the group consisting of Antisense Oligo Nos. 4121-4326 of Table 3, or a pharmaceutically acceptable salt thereof.

305. The oligonucleotide of claim 261, wherein the oligonucleotide is selected from the group consisting of Antisense Oligo Nos. 4327-4532 and 5173 of Table 3, or a pharmaceutically acceptable salt thereof.

306. The oligonucleotide of claim 261, wherein the oligonucleotide is selected from the group consisting of Antisense Oligo Nos. 4327-4532 of Table 3, or a pharmaceutically acceptable salt thereof.

307. The oligonucleotide of claim 261, wherein the oligonucleotide is selected from the group consisting of Antisense Oligo Nos. 4533-4738 and 5174 of Table 3, or a pharmaceutically acceptable salt thereof.

308. The oligonucleotide of claim 261, wherein the oligonucleotide is selected from the group consisting of Antisense Oligo Nos. 4533-4738 of Table 3, or a pharmaceutically acceptable salt thereof.

309. The oligonucleotide of claim 261, wherein the oligonucleotide is selected from the group consisting of Antisense Oligo Nos. 4739-4944 and 5175 of Table 3, or a pharmaceutically acceptable salt thereof.

310. The oligonucleotide of claim 261, wherein the oligonucleotide is selected from the group consisting of Antisense Oligo Nos. 4739-4944 of Table 3, or a pharmaceutically acceptable salt thereof.

311. The oligonucleotide of claim 261, wherein the oligonucleotide is selected from the group consisting of Antisense Oligo Nos. 4945-5150 and 5176 of Table 3, or a pharmaceutically acceptable salt thereof.

312. The oligonucleotide of claim 261, wherein the oligonucleotide is selected from the group consisting of Antisense Oligo Nos. 4945-5150 of Table 3, or a pharmaceutically acceptable salt thereof.

313. The oligonucleotide of claim 261, wherein the oligonucleotide is selected from the group consisting of Antisense Oligo Nos. 5152-5176 of Table 3, or a pharmaceutically acceptable salt thereof.

314. The oligonucleotide of any one of claims 1-313, wherein the oligonucleotide, or a pharmaceutically acceptable salt thereof, causes at least a 50% reduction in MSH3 mRNA expression at an oligonucleotide concentration of 10 nM.

315. The oligonucleotide of any one of claims 1-313, wherein the oligonucleotide, or a pharmaceutically acceptable salt thereof, causes at least a 60% reduction in MSH3 mRNA expression at an oligonucleotide concentration of 10 nM.

316. The oligonucleotide of any one of claims 1-313, wherein the oligonucleotide, or a pharmaceutically acceptable salt thereof, causes at least a 70% reduction in MSH3 mRNA expression at an oligonucleotide concentration of 10 nM.

317. The oligonucleotide of any one of claims 1-313, wherein the oligonucleotide, or a pharmaceutically acceptable salt thereof, causes at least an 80% reduction in MSH3 mRNA expression at an oligonucleotide concentration of 10 nM.

318. The oligonucleotide of any one of claims 1-313, wherein the oligonucleotide, or a pharmaceutically acceptable salt thereof, causes at least a 50% reduction in MSH3 mRNA expression at an oligonucleotide concentration of 1 nM.

319. The oligonucleotide of any one of claims 1-313, wherein the oligonucleotide, or a pharmaceutically acceptable salt thereof, causes at least a 60% reduction in MSH3 mRNA expression at an oligonucleotide concentration of 1 nM.

320. The oligonucleotide of any one of claims 1-313, wherein the oligonucleotide, or a pharmaceutically acceptable salt thereof, causes at least a 70% reduction in MSH3 mRNA expression at an oligonucleotide concentration of 1 nM.

321. The oligonucleotide of any one of claims 314-320, wherein the MSH3 mRNA expression is evaluated in vitro.

322. The oligonucleotide of claim 321, wherein the MSH3 mRNA expression is evaluated in a cell based assay.

323. The oligonucleotide of claim 322, wherein the MSH3 mRNA expression is evaluated in HeLa cells.

324. The oligonucleotide of any one of claims 314-323, wherein the MSH3 mRNA expression is determined by the quantitative reverse transcription polymerase chain reaction (RT-qPCR).

325. The oligonucleotide of any one of claims 314-324, wherein the MSH3 mRNA is expression is normalized to the mRNA expression of a reference gene.

326. The oligonucleotide of claim 325, wherein the MSH3 mRNA expression is normalized to the mRNA expression of beta-glucuronidase (GUSB).

327. The oligonucleotide of any one of claims 314-326, wherein the reduction in MSH3 mRNA expression is relative to a control.

328. The oligonucleotide of claim 327, wherein the control is the MSH3 mRNA expression in the absence of the oligonucleotide, or pharmaceutically acceptable salt thereof.

329. The oligonucleotide of claim 328, wherein the control is the MSH3 mRNA expression in the absence of the oligonucleotide, or pharmaceutically acceptable salt thereof, but in the presence of a control oligonucleotide, or salt thereof.

330. The oligonucleotide of claim 329, wherein the control oligonucleotide, or salt thereof, is a scrambled luciferase targeting oligonucleotide.

331. The oligonucleotide of any one of claims 314-330, wherein the reduction in MSH3 mRNA expression is calculated by a delta-delta Ct (ΔΔCT) method.

332. The oligonucleotide of any one of claim 331, wherein the delta-delta Ct (ΔΔCT) method comprises the normalization of the MSH3 mRNA expression to the mRNA expression of a reference gene and to the MSH3 mRNA expression in the absence of the oligonucleotide, or pharmaceutically acceptable salt thereof but in the presence of a control oligonucleotide, or salt thereof.

333. The oligonucleotide of claim 332, wherein the reference gene is beta-glucuronidase (GUSB) and/or the control oligonucleotide, or salt thereof, is a scrambled luciferase targeting oligonucleotide.

334. The oligonucleotide of any one of claims 314-333, wherein the reduction in MSH3 mRNA expression is determined by the method of Example 1.

335. The oligonucleotide of any one of claims 1-334, wherein the oligonucleotide is in the free base form.

336. The oligonucleotide of any one of claims 1-334, wherein the oligonucleotide is a pharmaceutically acceptable salt thereof.

337. The oligonucleotide of claim 336, wherein the oligonucleotide is a sodium salt.

338. A pharmaceutical composition comprising one or more of the oligonucleotides, or pharmaceutically acceptable salts thereof, of any one of claims 1-337 and a pharmaceutically acceptable carrier or excipient.

339. A composition comprising one or more of the oligonucleotides, or pharmaceutically acceptable salts thereof, of any one of claims 1-337 and a lipid nanoparticle, a polyplex nanoparticle, a lipoplex nanoparticle, or a liposome.

340. A method of inhibiting transcription of MSH3 in a cell, the method comprising contacting the cell with one or more of the oligonucleotides, or pharmaceutically acceptable salts thereof, of any one of claims 1-337, the pharmaceutical composition of claim 338, or the composition of claim 339 for a time sufficient to obtain degradation of an mRNA transcript of a MSH3 gene, inhibits expression of the MSH3 gene in the cell.

341. A method of treating, preventing, or delaying the progression a nucleotide repeat expansion disorder in a subject in need thereof, the method comprising administering to the subject one or more of the oligonucleotides, or pharmaceutically acceptable salts thereof, of any one of claims 1-337, the pharmaceutical composition of claim 338, or the composition of claim 339.

342. A method of reducing the level and/or activity of MSH3 in a cell of a subject identified as having a nucleotide repeat expansion disorder, the method comprising contacting the cell with one or more of the oligonucleotides, or pharmaceutically acceptable salts thereof, of any one of claims 1-337, the pharmaceutical composition of claim 338, or the composition of claim 339.

343. A method for inhibiting expression of an MSH3 gene in a cell comprising contacting the cell with one or more of the oligonucleotides, or pharmaceutically acceptable salts thereof, of any one of claims 1-337, the pharmaceutical composition of claim 338, or the composition of claim 339 and maintaining the cell for a time sufficient to obtain degradation of a mRNA transcript of an MSH3 gene, thereby inhibiting expression of the MSH3 gene in the cell.

344. A method of decreasing nucleotide repeat expansion in a cell, the method comprising contacting the cell with one or more of the oligonucleotides, or pharmaceutically acceptable salts thereof, of any one of claims 1-337, the pharmaceutical composition of claim 338, or the composition of claim 339.

345. The method of claim 340 and 342-344, wherein the cell is in a subject.

346. The method of claim 341 or 342, wherein the subject is a human.

347. The method of claim 345, wherein the cell is a cell of the central nervous system or a muscle cell.

348. The method of claim 346, wherein the subject is identified as having a nucleotide repeat expansion disorder.

349. The method of claim 348, wherein the nucleotide repeat expansion disorder is spinocerebellar ataxia type 36 or frontotemporal dementia.

350. The method of claim 348, wherein the nucleotide repeat expansion disorder is a trinucleotide repeat expansion disorder.

351. The method of claim 350, wherein the trinucleotide repeat expansion disorder is a polyglutamine disease.

352. The method of claim 350, wherein the polyglutamine disease is selected from the group consisting of dentatorubropallidoluysian atrophy, Huntington's disease, spinal and bulbar muscular atrophy, spinocerebellar ataxia type 1, spinocerebellar ataxia type 2, spinocerebellar ataxia type 3, spinocerebellar ataxia type 6, spinocerebellar ataxia type 7, spinocerebellar ataxia type 17, and Huntington's disease-like 2.

353. The method of claim 350, wherein the trinucleotide repeat expansion disorder is a non-polyglutamine disease.

354. The method of claim 353, wherein the non-polyglutamine disease is selected from the group consisting of fragile X syndrome, fragile X-associated tremor/ataxia syndrome, fragile XE mental retardation, Friedreich's ataxia, myotonic dystrophy type 1, spinocerebellar ataxia type 8, spinocerebellar ataxia type 12, oculopharyngeal muscular dystrophy, Fragile X-associated premature ovarian failure, FRA2A syndrome, FRA7A syndrome, and early infantile epileptic encephalopathy.

355. One or more of the oligonucleotides, or pharmaceutically acceptable salts thereof, of any one of claims 1-337, the pharmaceutical composition of claim 338, or the composition of claim 339 for use in the prevention or treatment of a nucleotide repeat expansion disorder.

356. The oligonucleotide, or pharmaceutically acceptable salt thereof, pharmaceutical composition, or composition for the use of claim 355, wherein the nucleotide repeat expansion disorder is spinocerebellar ataxia type 36 or frontotemporal dementia.

357. The oligonucleotide, or pharmaceutically acceptable salt thereof, pharmaceutical composition, or composition for the use of claim 356, wherein the nucleotide repeat expansion disorder is a trinucleotide repeat expansion disorder.

358. The oligonucleotide, or pharmaceutically acceptable salt thereof, pharmaceutical composition, or composition for the use of claim 357, wherein the trinucleotide repeat expansion disorder is selected from the group consisting of dentatorubropallidoluysian atrophy, Huntington's disease, spinal and bulbar muscular atrophy, spinocerebellar ataxia type 1, spinocerebellar ataxia type 2, spinocerebellar ataxia type 3, spinocerebellar ataxia type 6, spinocerebellar ataxia type 7, spinocerebellar ataxia type 17, Huntington's disease-like 2, fragile X syndrome, fragile X-associated tremor/ataxia syndrome, fragile XE mental retardation, Friedreich's ataxia, myotonic dystrophy type 1, spinocerebellar ataxia type 8, spinocerebellar ataxia type 12, oculopharyngeal muscular dystrophy, Fragile X-associated premature ovarian failure, FRA2A syndrome, FRA7A syndrome, and early infantile epileptic encephalopathy.

359. The oligonucleotide, or pharmaceutically acceptable salt thereof, pharmaceutical composition, or composition for the use of claim 357 or 358, wherein the trinucleotide repeat expansion disorder is Huntington's disease.

360. The oligonucleotide, or pharmaceutically acceptable salt thereof, pharmaceutical composition, or composition of claim 357 or 358, wherein the trinucleotide repeat expansion disorder is Friedreich's ataxia.

361. The oligonucleotide, or pharmaceutically acceptable salt thereof, pharmaceutical composition, or composition for the use of claim 357 or 358, wherein the trinucleotide repeat expansion disorder is myotonic dystrophy type 1.

362. The oligonucleotide, or pharmaceutically acceptable salt thereof, pharmaceutical composition, or composition of any of claims 355-361, wherein the oligonucleotide, pharmaceutical composition, or composition is administered intrathecally, intraventricularly, intracerebroventricularly, intraocularly, subcutaneously, intravenously, intra cisterna magnally, intramuscularly, or orally.

363. A method of treating, preventing, or delaying the progression a disorder in a subject in need thereof wherein the subject is suffering from nucleotide repeat expansion disorder, comprising administering to said subject one or more of the oligonucleotides, or pharmaceutically acceptable salts thereof, of any one of claims 1-337, the pharmaceutical composition of claim 338, or the composition of claim 339.

364. The method of claim 363, further comprising administering an additional therapeutic agent.

365. The method of claim 364, wherein the additional therapeutic agent is another oligonucleotide that hybridizes to an mRNA encoding the Huntingtin gene.

366. A method of preventing or delaying the progression of a nucleotide repeat expansion disorder in a subject, the method comprising administering to the subject one or more of the oligonucleotides, or pharmaceutically acceptable salts thereof, of any one of claims 1-337, the pharmaceutical composition of claim 338, or the composition of claim 339 in an amount effective to delay progression of a nucleotide repeat expansion disorder of the subject.

367. The method of claim 366, wherein the nucleotide repeat expansion disorder is spinocerebellar ataxia type 36 or frontotemporal dementia.

368. The method of claim 366, wherein the nucleotide repeat expansion disorder is a trinucleotide repeat expansion disorder.

369. The method of claim 368, wherein the trinucleotide repeat expansion disorder is selected from the group consisting of dentatorubropallidoluysian atrophy, Huntington's disease, spinal and bulbar muscular atrophy, spinocerebellar ataxia type 1, spinocerebellar ataxia type 2, spinocerebellar ataxia type 3, spinocerebellar ataxia type 6, spinocerebellar ataxia type 7, spinocerebellar ataxia type 17, Huntington's disease-like 2, fragile X syndrome, fragile X-associated tremor/ataxia syndrome, fragile XE mental retardation, Friedreich's ataxia, myotonic dystrophy type 1, spinocerebellar ataxia type 8, spinocerebellar ataxia type 12, oculopharyngeal muscular dystrophy, Fragile X-associated premature ovarian failure, FRA2A syndrome, FRA7A syndrome, and early infantile epileptic encephalopathy.

370. The method of claim 368 or 369, wherein the trinucleotide repeat expansion disorder is Huntington's disease.

371. The method of claim 368 or 369, wherein the trinucleotide repeat expansion disorder is Friedrich's ataxia.

372. The method of claim 368 or 369, wherein the trinucleotide repeat expansion disorder is myotonic Dystrophy type 1.

373. The method of claim 368 or 369, further comprising administering an additional therapeutic agent.

374. The method of claim 373, wherein the additional therapeutic agent is an oligonucleotide that hybridizes to an mRNA encoding the Huntingtin gene.

375. The method of any of claims 366-374, wherein progression of the nucleotide repeat expansion disorder is delayed by at least 120 days, for example, at least 6 months, at least 12 months, at least 2 years, at least 3 years, at least 4 years, at least 5 years, at least 10 years or more, when compared with a predicted progression.

376. One or more of the oligonucleotides, or pharmaceutically acceptable salts thereof, of any one of claims 1-337, the pharmaceutical composition of claim 338, or the composition of claim 339 for use in preventing or delaying progression of a nucleotide repeat expansion disorder in a subject.

377. The oligonucleotide, or pharmaceutically acceptable salt thereof, pharmaceutical composition, or composition of claim 376, wherein the nucleotide repeat expansion disorder is spinocerebellar ataxia type 36 or frontotemporal dementia.

378. The oligonucleotide, or pharmaceutically acceptable salt thereof, pharmaceutical composition, or composition of claim 376, wherein the nucleotide repeat expansion disorder is a trinucleotide repeat expansion disorder.

379. The oligonucleotide, or pharmaceutically acceptable salt thereof, pharmaceutical composition, or composition of claim 378, wherein the trinucleotide repeat expansion disorder is selected from the group consisting of dentatorubropallidoluysian atrophy, Huntington's disease, spinal and bulbar muscular atrophy, spinocerebellar ataxia type 1, spinocerebellar ataxia type 2, spinocerebellar ataxia type 3, spinocerebellar ataxia type 6, spinocerebellar ataxia type 7, spinocerebellar ataxia type 17, Huntington's disease-like 2, fragile X syndrome, fragile X-associated tremor/ataxia syndrome, fragile XE mental retardation, Friedreich's ataxia, myotonic dystrophy type 1, spinocerebellar ataxia type 8, spinocerebellar ataxia type 12, oculopharyngeal muscular dystrophy, Fragile X-associated premature ovarian failure, FRA2A syndrome, FRA7A syndrome, and early infantile epileptic encephalopathy.

380. The oligonucleotide, or pharmaceutically acceptable salt thereof, pharmaceutical composition, or composition of claim 378 or 379, wherein the trinucleotide repeat expansion disorder is Huntington's disease.

381. The oligonucleotide, or pharmaceutically acceptable salt thereof, pharmaceutical composition, or composition of claim 378 or 379, wherein the trinucleotide repeat expansion disorder is Friedrich's ataxia.

382. The oligonucleotide, or pharmaceutically acceptable salt thereof, pharmaceutical composition, or composition of claim 378 or 379, wherein the trinucleotide repeat expansion disorder is myotonic Dystrophy type 1.

383. The oligonucleotide, or pharmaceutically acceptable salt thereof, pharmaceutical composition, or composition of any one of claims 375-382, wherein progression of the nucleotide repeat expansion disorder is delayed by at least 120 days, for example, at least 6 months, at least 12 months, at least 2 years, at least 3 years, at least 4 years, at least 5 years, at least 10 years or more, when compared with a predicted progression.
